(19) United States
(12) Patent Application Publication
(10) Pub. No.: US 2010/0281003 A1
(43) Pub. Date: Nov. 4, 2010

(54) SYSTEM AND USES FOR GENERATING DATABASES OF PROTEIN SECONDARY STRUCTURES INVOLVED IN INTER-CHAIN PROTEIN INTERACTIONS

(75) Inventors: Andrea L. JOCHIM, New York, NY (US); Paramjit S. ARORA, White Plains, NY (US)

Correspondence Address: NIXON PEABODY LLP - PATENT GROUP, 1100 CLINTON SQUARE, ROCHESTER, NY, 14604, US

(73) Assignee: NEW YORK UNIVERSITY, New York, NY (US)

(21) Appl. No.: 12/753,638

(22) Filed: Apr. 2, 2010

Related U.S. Application Data
(60) Provisional application No. 61/166,211, filed on Apr. 2, 2009.

(51) Int. Cl. G06F 17/30

(52) U.S. Cl. 707/692; 707/740; 707/E17.046; 707/E17.014

(57) ABSTRACT

The present invention relates to methods and systems for generating a database of protein secondary structures that are at an interface of a two-chain inter-protein interaction. Collections of secondary structures identified according to the methods disclosed herein, and their use in identifying therapeutic drug candidates potentially effective in modulating a two-chain inter-protein interaction having a secondary structure at its interface, are also disclosed.

[0001] This application claims the priority benefit of U.S. Provisional Patent Application Ser. No. 61/166,211, filed Apr. 2, 2009, which is hereby incorporated by reference in its entirety.

[0002] This invention was made with government support under grant number GM073943 awarded by the National Institutes of Health. The government has certain rights in this invention.

### FIELD OF THE INVENTION

[0003] The present invention relates to methods and systems for generating a database of protein secondary structures that are at an interface of a two-chain inter-protein interaction. Collections of the secondary structures that are at the interface of inter-protein interactions and methods of screening are also disclosed.

### BACKGROUND OF THE INVENTION

[0004] A fundamental limitation of current drug development centers on the inability of traditional pharmaceuticals to target spatially extended protein interfaces. The majority of modern pharmaceuticals are small molecules that target enzymes or protein receptors with defined pockets. However, in general they cannot target protein-protein interactions involving large contact areas with the required specificity. Recent computational and experimental studies highlight the “hot-spots” on protein surfaces that contribute significantly to binding interactions (Clackson et al., “A Hot-Spot of Binding-Energy in a Hormone-Receptor Interface,” Science 267:383-386 (1995); Guney et al., “HotSprint: Database of Computational Hot Spots in Protein Interfaces,” Nucleic Acids Res. 36:D662-D666 (2008); Keskin et al., “Principles of Protein-Protein Interactions: What Are the Preferred Ways for Proteins to Interact?,” Chem. Rev. 108:1225-1244 (2008); Wells et al., “Reaching for High-Hanging Fruit in Drug Discovery at Protein-Protein Interfaces,” Nature 450:1001-1009 (2007)). Hot-spot residues are those residues at the protein interface that contribute to high affinity binding and are usually surrounded by energetically less important residues. Typically, the first step in developing a small molecule inhibitor to target a protein interface is to identify hot-spot residues responsible for protein-complex recognition. Subsequently, the topography of these side chains is reproduced by similar peptidic or non-peptidic functionalities on a scaffold that positions the crucial recognition elements correctly. Thus, protein-protein recognition may be concentrated in a few key residues arranged in a particular three-dimensional shape.

[0005] Selective modulation of protein-protein interactions is a grand challenge for chemical biologists and medicinal chemists (Wells et al., “Reaching for High-Hanging Fruit in Drug Discovery at Protein-Protein Interfaces,” Nature 450:1001-1009 (2007)). Protein interfaces are often composed of large shallow surfaces rendering them difficult targets for typical small molecule drugs (Argos, P., “An Investigation of Protein Subunit and Domain Interfaces,” Protein Eng. 2:101-113 (1988); Miller, S., “The Structure of Interfaces Between Subunits of Dimeric and Tetrameric Proteins,” Protein Eng. 3:77-83 (1989); Lo Conte et al., “The Atomic Structure of Protein-Protein Recognition Sites,” J. Mol. Biol. 285:2177-2198 (1999)). A broad effort to develop new classes of protein-protein interaction inhibitors has focused on the fundamental role played by short folded domains, or protein secondary structures, at protein interfaces (Miller, S., “The Structure of Interfaces Between Subunits of Dimeric and Tetrameric Proteins,” Protein Eng. 3:77-83 (1989)).

[0006] α-Helices constitute the largest class of protein secondary structures and mediate many protein interactions (Guharoy et al., “Secondary Structure Based Analysis and Classification of Biological Interfaces: Identification of Binding Motifs in Protein-Protein Interactions,” Bioinformatics 23:1909-1918 (2007); Jones et al., “Protein-Protein Interactions: A Review of Protein Dimer Structures,” Prog. Biophys. Mol. Bio. 63:31-65 (1995)). Helices located within the protein core are vital for the overall stability of protein tertiary structure, whereas exposed α-helices on protein surfaces constitute central bioactive regions for the recognition of numerous proteins, DNAs, and RNAs. Peptides composed of less than fifteen amino acid residues do not generally form α-helical structures at physiological conditions once excised from the protein environment; much of their ability to specifically bind their intended targets is lost because they adopt an ensemble of conformations rather than the biologically relevant one. Synthetic strategies that either stabilize short peptides (<15 residues) into α-helical conformations or mimic this domain with nonnatural scaffolds are expected to be useful models for the design of bioactive molecules and for studying aspects of protein folding (Henchey et al., “Contemporary Strategies for the Stabilization of Peptides in the Alpha-Helical Conformation,” Curr. Opin. Chem. Biol. 12:692-697 (2008); Garner et al., “Design and Synthesis of Alpha-Helical Peptides and Mimetics,” Org. BiomoL Chem. 5:3577-3585 (2007); Davis et al., “Synthetic Non-Peptide Mimetics of Alpha-Helices,” Chem. Soc. Rev. 36:326-334 (2007); Murray et al., “Targeting Protein-Protein Interactions: Lessons from 53/MDM2,” Biopolymers 88:657-686 (2007)).

[0007] Several classes of helix mimetics have been described by the synthetic organic chemistry community (Henchey et al., “Contemporary Strategies for the Stabilization of Peptides in the Alpha-Helical Conformation,” Curr. Opin. Chem. Biol. 12:692-697 (2008); Garner et al., “Design and Synthesis of Alpha-Helical Peptides and Mimetics,” Org. Biomol. Chem. 5:3577-3585 (2007); Davis et al., “Synthetic Non-Peptide Mimetics of Alpha-Helices,” Chem. Soc. Rev. 36:326-334 (2007); Murray et al., “Targeting Protein-Protein Interactions: Lessons from p53/MDM2,” Biopolymers 88:657-686 (2007)), but progress in the use of these helix mimetics in biology has been limited to a set of model protein complexes. The restricted use of these mimetics can be attributed to the lack of a systematic method for identifying helical protein interfaces that may be targeted by the various classes of stabilized helices and synthetic helix mimetics. Therefore, what is needed is a comprehensive method for identifying inter-protein interactions that serve as potential targets for the development of helical and other secondary structure mimetics.

[0008] The present invention is directed to overcoming these and other deficiencies in the art.

### SUMMARY OF THE INVENTION

[0009] A first aspect of the present invention relates to a method of generating a database of protein secondary structures that are at an interface of a two-chain inter-protein interaction. This method involves retrieving, from a protein database, multi-entity protein structures having one or more inter-chain interactions; extracting, from the retrieved multi-entity protein structures, two-chain protein structures; distinguishing the extracted two-chain protein structures having inter-protein interactions from the extracted two-chain protein structures having only intra-protein interactions; identifying the distinguished two-chain inter-protein interactions that comprise a protein secondary structure at their interface; and storing in a memory storage device the protein secondary structures at an interface of the identified two-chain inter-protein interactions.

[0010] Another aspect of the present invention relates to a computer readable medium that has stored thereon instructions that when executed by a processor generate a database of protein secondary structures that are at an interface of a two-chain inter-protein interaction. This computer readable medium has residing thereon machine executable code that when executed by at least one processor, causes the processor to perform steps that include retrieving, from a protein database, multi-entity protein structures having one or more inter-chain interactions; extracting, from the retrieved multi-entity protein structures, two-chain protein structures. The machine executable code further contains instructions in a computer programming language for distinguishing the extracted two-chain protein structures having inter-protein interactions from the extracted two-chain protein structures having only intra-protein interactions, and identifying the distinguished two-chain inter-protein interactions that comprise a protein secondary structure at their interface. The generated database of protein secondary structures that are at an interface of a two-chain inter-protein interaction are stored in a memory storage device in a format suitable for computer automated and/or manual data analysis, and/or for display/printing on a display or printing device linked to a computing system.

[0011] Another aspect of the present invention is directed to a system for generating a database of protein secondary structures that are at an interface of a two-chain inter-protein interaction. The components of this system include a retrieval module that retrieves, from a protein database stored on a memory device, multi-entity protein structures having one or more inter-chain interactions; an extraction module that extracts, from the retrieved multi-entity protein structures, two-chain protein structures; a distinguishing module that distinguishes the extracted two-chain protein structures having inter-protein interactions from the extracted two-chain protein structures having only intra-protein interactions; an identification module that identifies the distinguished two-chain inter-protein interactions that comprise a protein secondary structure at their interface; and a storage module for storing to a memory storage device the protein secondary structures at an interface of the identified two-chain inter-protein interactions. The modules/sub-modules described herein can be hardware implemented, software implemented, or an appropriate combination of both, as can be contemplated by one skilled in the art, after reading this disclosure.

[0012] Another aspect of the present invention relates to a collection of isolated protein secondary structures that are at an interface of a two-chain inter-protein interaction. This collection preferably contains about 1%, about 5%, about 10%, about 20%, about 40%, about 60%, about 80%, or about 100% of the isolated protein secondary structures of Table 2.

[0013] Another aspect of the present invention relates to a method of identifying a therapeutic drug candidate potentially effective in modulating a two-chain inter-protein interaction having a secondary structure at its interface. In one embodiment, this method involves providing a therapeutic drug candidate; selecting a protein secondary structure from a collection described herein; providing an agent that mimics the protein secondary structure; contacting the therapeutic drug candidate with the agent under conditions effective for the therapeutic drug candidate to bind to the agent; and detecting whether any binding occurs between the therapeutic drug candidate and the agent, where binding between the therapeutic drug candidate and the agent indicates that the therapeutic drug candidate is potentially effective in modulating a two-chain inter-protein interaction having the protein secondary structure at its interface.

[0014] In another embodiment, this method involves selecting a protein secondary structure from a collection of secondary structures described herein; providing a therapeutic drug candidate that mimics the protein secondary structure, and at least one protein of a two-chain inter-protein interaction having the secondary structure at its interface; contacting the therapeutic drug candidate with the at least one protein under conditions effective for the therapeutic drug candidate to bind to the at least one protein; and detecting whether any binding occurs between the therapeutic drug candidate and the at least one protein, where binding between the therapeutic drug candidate and the at least one protein indicates that the therapeutic drug candidate is potentially effective in modulating the two-chain inter-protein interaction.

### BRIEF DESCRIPTION OF THE DRAWINGS

[0015] FIGS. 1A-1B are block diagrams of a system and modules for generating a database of protein secondary structures that are at an interface of a two-chain inter-protein interaction.

[0016] FIG. 2 is a flow chart of a method of generating a database of protein secondary structures that are at an interface of a two-chain inter-protein interaction.

[0017] FIG. 3 shows an α-helix surrounded by various stabilized helices and nonnatural helix mimetics. Several of these mimetic strategies stabilize the R-helical conformation in peptides or mimic this domain with nonnatural scaffolds. These mimetic scaffolds include β-peptide helices, terphenyl helix mimetics, miniproteins, peptoid helices, side-chain crosslinked α-helices, and hydrogen-bond-surrogate (“HBS”) backbone cross-linked α-helices.

[0018] FIG. 4 is a flow chart illustrating a method of generating a database of helical secondary structures that are at an interface of a two-chain inter-protein interaction.

[0019] FIGS. 5A and 5B are pie charts showing the fraction of Protein Data Bank entries containing proteins involved in helical interfaces (FIG. 5A) and the classification of these proteins by function (FIG. 5B).

### DETAILED DESCRIPTION OF THE INVENTION

[0020] A system 10 that generates a database of protein secondary structures that are at an interface of a two-chain inter-protein interaction in accordance with other embodiments of the present invention is illustrated in FIG. 1A. The system 10 includes a computing system 12, a local database 32, a server system 14, a database 18, and a communication network 16, although the system 10 can include other types and numbers of components connected in other manners. The present invention provides a more effective method and system for generating a database of protein secondary structures that are at an interface of two-chain inter-protein interactions.

[0021] Referring more specifically to FIG. 1A, the computing system 12 is used to generate a database of protein secondary structures that are at an interface of two-chain inter-protein interactions, although other types and numbers of systems could be used, such as a server 14 (e.g., an application server), and other types and numbers of functions can be performed by the computing system 12. The computing system 12 includes a central processing unit (“CPU”) or processor 20, a memory 22, user input device 24, a display 26, and an interface system 28, and which are coupled together by a bus 30 or other link, although the computing system 12 can include other numbers and types of components, parts, devices, systems, and elements in other configurations.

[0022] The processor 20 executes a computer program or code comprising stored instructions for one or more aspects of the present invention as described and illustrated herein, although the processor could execute other numbers and types of programmed instructions. Accordingly, the computer program or code when executed by the processor performs steps for generating a database of protein secondary structures that are at an interface of a two-chain inter-protein interaction. The processor retrieves information from a database 18 connected to a remote server 14 via a communication network 16, although server 14 may not be remotely connected. According to one embodiment, the database 18 is a protein database from which multi-entity protein structures having one or more inter-chain interactions are retrieved. By executing instructions/computer program code stored, for example, in memory 22, the processor 20 extracts from the retrieved multi-entity protein structures, two-chain protein structures. The processor 20 further executes computer code that carries out the steps of distinguishing the extracted two-chain protein structures having inter-protein interactions from the extracted two-chain protein structures having only intra-protein interactions, and identifying the distinguished two-chain inter-protein interactions that comprise a protein secondary structure at their interface. From the identified two-chain inter-protein interactions that comprise a protein secondary structure at their interface, the code executed by the processor 20 extracts information pertaining to the identified interactions either for display 26 or for storage in memory 22 for later retrieval, or both, for further manipulation by a user of computing system 12, or storage in a memory storage device which is a component of the computing system 12 or a local database 32, or both.

[0023] The memory 22 stores the programmed instructions written in a computer programming language or software package for carrying out one or more aspects of the present invention as described and illustrated herein, although some or all of the programmed instructions could be stored and/or executed elsewhere. For example, instructions for executing the above-noted steps can be stored in a distributed storage environment where memory 22 is shared between one or more computing systems similar to computing system 12. A local database 32 that is separate from the computing system 12 can optionally store the programmed instructions and the identified data sets of inter-protein interactions (or other extracted information) that are identified and stored in a database using the methods and systems of the present invention. Alternatively, instead of a single computing system 12, a distributed computing system, controlled by one or more controller chips and comprising one or more computers, can also be used to execute computer program code instructions that perform various steps and methods, or control systems/modules that perform those steps of the present invention, can be contemplated by those skilled in the art, after reading this disclosure.

[0024] A variety of different types of memory storage devices, such as a random access memory (RAM) or a read only memory (ROM) in the system or a floppy disk, hard disk, CD ROM, or other computer readable medium which is read from and/or written to by a magnetic, optical, or other reading and/or writing system that is coupled to one or more processors, can be used for the memory 22.

[0025] The user input device 24 in the computing system 12 is used to input information for a search query, although the user input device 24 could be used to input other types of data and interact with other elements. The user input device 24 can include a computer keyboard and a computer mouse, although other types and numbers of user input devices can be used.

[0026] The display 26 in the computing system 12 is used to show the extracted data or information from the identified two-chain inter-protein interactions containing a secondary structure at their interface. For example, the display can show the two-chain inter-protein interaction that contains a secondary structure at its interface, the secondary structure that is at the interface of the identified two-chain inter-protein interaction, the interface residues of the secondary protein structure at the interface of the identified two-chain inter-protein interaction, or any combination of this extracted information. The display 26 can include a computer display screen, such as a CRT or LCD screen, although other types and numbers of displays could be used.

[0027] The interface system 28 is used to operatively couple and communicate between the computing system 12, the server system 14, and the database 18 over a communication network 16, although other types and numbers of communication networks or systems with other types and numbers of connections and configurations to other types and numbers of systems, devices, and components can be used. By way of example only, the communication network 16 can use TCP/IP over Ethernet and industry-standard protocols, including SOAP, XML, LDAP, and SNMP, although other types and numbers of communication networks, such as a direct connection, a local area network, a wide area network, modems and phone lines, e-mail, optical and/or wireless communication technology, each having their own communications protocols, can be used.

[0028] The server system 14 is used to assist the computing system 10 retrieve and provide the requested data set of multi-chain inter-protein interactions although the server system 14 can perform other types and numbers of functions and the present invention can be executed in the computing system 12 without a network connection to the server system 14 or any other system. The interface system in server system 14 is used to operatively couple and communicate between the server system 14 and the computing system 12, although other types of connections and other types and combinations of systems could be used. Alternatively, server system 14 can be a distributed server or a plurality of servers each handling respective one or more electronic queries from a user of computing system 12 or an automated querying code being executed at the computing system 12.

[0029] Although embodiments of the computing system 12 and server system 14 are described and illustrated herein, the computing system and server can be implemented on any suitable computing system or computing device. It is to be understood that the devices and systems of the embodiments described herein are for exemplary purposes, as many variations of the specific hardware and software used to implement the embodiments are possible, as will be appreciated by those skilled in the relevant art(s).

[0030] Furthermore, each of the systems of the embodiments may be conveniently implemented using one or more general purpose computer systems, microprocessors, digital signal processors, and micro-controllers, programmed according to the teachings of the embodiments, as described and illustrated herein, and as will be appreciated by those of ordinary skill in the art.

[0031] In addition, two or more computing systems or devices can be substituted for any one of the systems in any embodiment of the embodiments. Accordingly, principles and advantages of distributed processing, such as redundancy and replication, also can be implemented, as desired, to increase the robustness and performance of the devices and systems of the embodiments. The embodiments may also be implemented on computer system or systems that extend across any suitable network using any suitable interface mechanisms and communications technologies, including, by way of example only, telecommunications in any suitable form (e.g., voice and modem), wireless communications media, wireless communications networks, cellular communications networks, G3 communications networks, Public Switched Telephone Networks (PSTNs), Packet Data Networks (PDNs), the Internet, intranets, and combinations thereof

[0032] The embodiments may also be embodied as a computer readable medium having instructions stored thereon for one or more aspects of the present invention as described and illustrated by way of the embodiments herein, as described herein, which when executed by a processor, cause the processor to carry out the steps necessary to implement the methods of the embodiments, as described and illustrated herein. In a preferred embodiment, the computer readable code comprises a retrieval module, an extraction module, a distinguishing module, an identification module, and a storage module as shown in FIG. 1B. Computer readable medium containing these modules can be executed by one or more processors to generate a database of protein secondary structures that are at an interface of a two-chain inter-protein in interaction.

[0033] The method for generating a database of protein secondary structures that are at an interface of a two-chain inter-protein interaction in accordance with the exemplary embodiments will now be described with reference to FIG. 2. Although in this particular example, the processing steps described herein are executed by the computing system 12, some or all of these steps can be executed by other systems, devices, or components. Parts of the executable computer code can be fully automated scripts executed by CPU 20 requiring no human intervention, or alternatively can be manually executed in a step-by-step prompt manner.

[0034] In step 100, using one or more search queries, the user of computing system 12 retrieves from a protein database (connected to a remote server or connected locally to the computing system 12), multi-entity protein structures having one or more inter-chain interactions. A multi-entity protein structure encompasses any multi-protein macromolecule structure. Suitable multi-entity protein structures can be retrieved from protein databases like the Research Collaboratory for Structural Bioinformatics (“RCSB”) Protein Data Bank or the World Wide Protein Data Bank, or from other public and private databases.

[0035] In step 102, the computing system 12 executes code that extracts, from the retrieved multi-entity protein structures, two-chain protein structures. When multi-entity protein structures are retrieved from the Protein Data Bank, the format of a Protein Data Bank file allows for the retrieval of each protein chain from the file. For example, the first column of the file contains the word “ATOM” if that atom is part of a protein chain. Each chain is separated by the characters “TER”. Additionally, the fifth row of every line that begins with the “ATOM” contains the single character representing the chain. Using these three variables, the computing system 12 first identifies all chains in the Protein Data Bank file. After all chains have been identified the computing system 12 creates all possible pairs of chains. If there are n chains in the Protein Data Bank file then there will be n(n−1)/2 pairs of chains. The computing system 12 then extracts the coordinates of each pair of chains to a new file. The extracted two-chain protein structures may include both inter-protein interactions (i.e., interactions between two chains of different proteins) and intra-protein interactions (i.e., interactions between two chains of the same protein).

[0036] In step 104, the computing system 12 executes code that distinguishes the extracted two-chain protein structures having inter-protein interactions from the extracted two-chain protein structures having only intra-protein interactions. The Protein Data Bank files list the chains of each separate entity. Using the list of chains in each protein entity, the computing system 12 creates a list of possible chain pairs subject to the condition that chain pairs are not created between chains that are within the same protein entity. Any chain pairs generated from step 102 are compared to this list. Those chain pairs which appear in the list are retained and those that do not are discarded. The retained chain pairs are referred to as “inter-protein” interactions and the discarded chain pairs are referred to as “intra-protein” interactions.

[0037] In step 106, the computing system 12 executes code that identifies the distinguished two-chain inter-protein interactions that comprise a protein secondary structure at their interface. The protein secondary structure can be any secondary structure known in the art. Preferably, the protein secondary structure is a helical secondary structure, e.g., an α-helical structure. Alternatively, the protein secondary structure is a β-strand structure (also called a β-extended strand), which comprises a single continuous stretch of amino acids (e.g., 5-10 residues) that adopts an extended conformation. In another embodiment, the protein secondary structure is a β-turn structure, which comprises a short stretch of four amino acid residues in which the polypeptide chain folds back on itself by nearly 180-degrees. Methods of identifying these secondary structures are described below.

[0038] In accordance with this aspect of the present invention, identification of the distinguished two-chain inter-protein interactions that comprise a secondary structure at their interface (step 106) is achieved by linking methods of identifying protein secondary structures with methods of identifying inter-protein interaction interface amino acid residues. Although various methods of identifying protein secondary structures and methods of identifying protein interaction interface amino acid residues are available in the art, using these methods or tools individually, or even sequentially, will not identify protein secondary structures that are at an interface of an inter-chain protein interaction and the corresponding amino acid residues comprising this interface. In other words, employing a computational method for predicting a secondary structure in a two-chain inter-protein structure will identify secondary structures within the chains, but will not distinguish between secondary structures located within a protein core and secondary structures located at the interface of the inter-protein interaction. Likewise, methods of predicting amino acid residues involved in an inter-protein interaction of a two-chain protein structure will identify all interface residues without distinguishing between interface residues that are in a secondary structure and interface residues that are not in a secondary structure. The method of the present invention links these respective methods to simultaneously identify protein secondary structures at an interface and the corresponding interface amino acid residues.

[0039] The method of predicting secondary structures in step 106 can be any method known in the art. For example, as described infra, protein secondary structures can be identified by calculating the dihedral angles (φ and φ angles) of the protein backbone. Using this methodology, a helical secondary structure is identified as a protein chain segment containing at least four contiguous residues with φ and φ angles that are characteristic of an α-helix (φ=−57°±50°, φ=−47°±50°). Alternatively, a β-strand structure is identified as a protein chain segment comprising a single continuous stretch of amino acids having characteristic dihedral angles of φ=−180°±50°, φ=−180°±50°. A β-turn structure is identified as a short protein chain segment consisting of four amino acid residues (denoted by i, i+1, i+2, i+3) that fold back on themselves. There are nine classes of β-turns, each characterized by the φ and φ angles of residues i+1 and i+2 shown in Table 1.

TABLE 1
Dihedral Angles of β-Turn Structures

| Type | Phi (i + 1) | Psi (i + 1) | Phi (i + 2) | Psi (i + 2) |
|---|---|---|---|---|
| I | −60 | −30 | −90 | 0 |
| II | −60 | 120 | 80 | 0 |
| VIII | −60 | −30 | −120 | 120 |
| I′ | 60 | 30 | 90 | 0 |
| II′ | 60 | −120 | −80 | 0 |
| VIa1 | −60 | 120 | −90 | 0 |
| VIa2 | −120 | 120 | −60 | −0 |
| VIb | −135 | 135 | −75 | 160 |

| | |
|---|---|
| IV | Turns excluded from all the above categories |

[0040] A variety of other methods for identifying or predicting protein secondary structures are known in the art and are suitable for use in step 106 of the method of the present invention. These methods include identifying secondary structures based on hydrogen bonding (Baker at al., “Hydrogen Bonding in Globular Proteins,” Prog. Biophys. Mol. Biol. 44:97-179 (1984), which is hereby incorporated by reference in its entirety), hydrogen bond energy and statistically derived backbone torsion angle information (STRIDE) (Frishman et al., “Knowledge-Based Protein Secondary Structure Assignment,” Proteins: Structure, Function, and Genetics 23:566-579 (1995), which is hereby incorporated by reference in its entirety), simplified distance criteria applied to donor and acceptor separation (Fan et al., “Three-Dimensional Structure of an Fv from a Human IgM Immunoglobulin,” J. Mol. Biol. 228:188-207 (1992); Muller et al., “Structure of the Complex Between Adenylate Kinase from Escherichia coli and the Inhibitor Ap5A Refined at 1.9 Å Resolution,” J. Mol. Biol. 224:159-177 (1992), which are hereby incorporated by reference in their entirety), distance and geometric criteria (Presta et al., “Helix Signals in Proteins,” Science 240:1632-41 (1988), which is hereby incorporated by reference in its entirety), hydrogen bonding patterns in combination with main-chain dihedral angles (Benning et al., “Molecular Structure of Cytochrome c2 Isolated from Rhodobacter capsulatis Determined at 2.5 Å Resolution,” J. Mol. Biol. 220:673-685 (1991) McPhalen et al., “X-ray Structure Refinement and Comparison of Three Forms of Mitochondrial Aspartate Aminotransferase,” J. Mol. Biol. 225:495-517 (1992), which are hereby incorporated by reference in their entirety), the DSSP algorithm (Kabsch et al., “Dictionary of Protein Secondary Structure: Pattern Recognition of Hydrogen-Bonded and Geometrical Features,” Bioploymers 22:2577-2637 (1983), which is hereby incorporated by reference in its entirety), visual criteria (Other et al., “Crystallographic Refinement and Structure of DNase I at 2 Å Resolution,” J. Mol. Biol. 192:605-632 (1986), which is hereby incorporated by reference in its entirety), and a combination of several independent assignment methods (Weiss et al., “Structure of Porin Refined at 1.8 Å Resolution,” J. Mol. Biol. 227:493-509 (1992), which is hereby incorporated by reference in its entirety).

[0041] The method employed for identifying the corresponding amino acid residues of the secondary structure that are at the interface of the two-chain inter-protein interaction of step 106 can be any method known in the art. For example, as described infra, an interface amino acid residue can be identified as a residue in one protein chain of an inter-protein interaction having at least one atom within a 5 Å radius of an atom in the other protein chain of the two-chain inter-protein interaction (Ofran et al., “Analysing Six Types of Protein Interfaces,” J. Mol. Biol. 325:377-0387 (2003); Kortemme et al., “Computational Alanine Scanning of Protein-Protein Interfaces,” Sci. STKE 2004(219):12 (2004), which are hereby incorporated by reference in their entirety). Alternatively an interface amino acid residue is identified as a result of it becoming significantly buried upon interaction with residues of another protein. Accordingly, measuring the density of C_{β} atoms surrounding a C_{β} atom of an amino acid residue in one chain of an identified two-chain inter-protein interaction can identify interface amino acid residues (Ofran et al., “Analysing Six Types of Protein Interfaces,” J. Mol. Biol. 325:377-0387 (2003); Kortemme et al., “Computational Alanine Scanning of Protein-Protein Interfaces,” Sci. STKE 2004(219):12 (2004), which are hereby incorporated by reference in their entirety).

[0042] An alternative method for identifying interface amino acid residues that is also suitable for use in step 106 of the claimed method involves calculating the solvent accessible surface area (“SASA”) (Jones et al., “Principles of Protein-Protein Interactions,” Proc. Natl Acad. Sci. USA 93:13-20 (1996), which is hereby incorporated by reference in its entirety). Various algorithms for calculating SASA are known in the art, each defining an interface residue based on its change in solvent accessible surface area when transitioning from an unbound state to a bound state.

[0043] Some two-chain inter-protein interactions may be present in more than one database (e.g., PDB) entry. Following identification of the two-chain inter-protein interactions that contain a secondary structure at their interface in step 106, it may be desirable to remove any redundant interactions from the identified two-chain inter-protein interactions before extracting and storing information regarding the identified interactions. As described herein, redundant interactions (i.e., structures having greater than 95% sequence similarity) can be searched and removed using the CD-HIT algorithm (Li et al., “Clustering of Highly Homologous Sequences to Reduce the Size of Large Protein Databases,” Bioinformatics 17:282-283 (2001), which is hereby incorporated by reference in its entirety). Other sequence alignment programs known in the art are also suitable for removing redundant interactions. The CD-HIT algorithm searches the sequence information of each chain of an interaction from the PDB FASTA file. To ensure that only redundant two-chain interactions are removed (rather than redundant single chains), it is preferable to remove the chain identifier from the FASTA file before executing the CD-HIT algorithm search, so that the entire amino acid sequence of the protein-protein complex is searched rather than just the individual protein chains.

[0044] In step 108 the user computer executes code that extracts information from the identified two-chain inter-protein interactions that contain a secondary structure at their interface. This extracted information can be stored and/or displayed in any format suitable for the user viewing the information. The extracted information may contain a list of the two-chain inter-protein interactions that contain a secondary structure at their interface. In another embodiment, the extracted information may show the secondary structures that are at the interface of a two-chain inter-protein interaction. In another embodiment, the extracted information may name the interface residues within the protein secondary structures at the interface of a two-chain inter-protein interaction. The user computer can extract any of the above information alone or in combination. Suitable examples of extracted information include the information shown in Tables 2, 6, and 17 herein.

[0045] In step 110, the extracted information is stored in a memory storage device. The stored extracted information can be readily retrieved by a user and used for any desired application. For example, as described below, the extracted information can be used to further identify hot-spot amino acid residues within the identified interface residues of a two-chain inter-protein interaction containing a secondary structure at its interface. Optionally, the extracted information can be forwarded to other computer systems and/or databases external to computing system 12 for further processing.

[0046] In step 112, the database of secondary structures that are at an interface of a two-chain inter-protein interaction can be updated periodically by querying the protein database at various time intervals to identify one or more additional multi-entity protein structures. Such updating can be manual or automated. Once a new multi-entity structure is identified (step 114), it is retrieved, two-chain protein structures are extracted, two-chain protein structures containing inter-protein interactions are distinguished from two-chain protein structures containing only intra-protein interactions, and two-chain inter-protein interactions that have a protein secondary structure at their interface are identified and stored/displayed. Information (e.g., the function and/or identity of the proteins involved in the two-chain inter-protein interactions, the secondary structures present at their interface, and/or the interface residues within the secondary structure) concerning the newly-identified two-chain inter-protein interactions is compared to the information present in the existing database to identify non-redundant information. Any non-redundant information can be added to the database by storing it in the memory storage device, or any of the databases shown in FIG. 1A.

[0047] The present method identifies, e.g., interface amino acid residues within a protein secondary structure at the interface of a two-chain inter-protein interaction. In a preferred embodiment of the present invention, the “hot spot” amino acid residues among the identified interface residues are also identified. As used herein, “hot spot” amino acid residues refers to those interface amino acid residues that are important mediators of the two-chain inter-protein binding interaction. More specifically, hot spot residues are the interface residues that contribute significantly to the binding free energy of the protein-protein complex. Hot spot residues and their corresponding binding sites can be identified, for example, using amino acid mutation or substitution technique. In a preferred embodiment, hot spot residues are identified using alanine mutagenesis techniques. Following substitution of an individual interface residue with an alanine residue, the free energy of the protein complex is computed. Hot-spot residues are identified as those residues in which alanine substitution has a destabilizing effect on the free energy of binding (ΔΔG_{bind}) of more than 1 kcal/mol (Bogan et al., “Anatomy of Hot Spots in Protein Interfaces,” J. Mol. Biol. 280(1):1-9 (1998); Keskin et al., “Principles of Protein-Protein Interactions: What Are the Preferred Ways for Proteins to Interact?” Chem. Rev. 108(4): 1225-44 (2008), which are hereby incorporated by reference in their entirety).

[0048] Alanine mutagenesis can be carried out using experimental or theoretical approaches. Experimental approaches include systematic alanine mutagenesis of the identified interface residues by generating and purifying individual mutant proteins for analysis. However, because this is a time-consuming and laborious procedure, it is preferable to use an alternative, high through-put method such as a combinatorial library of alanine substitution or the method of “shotgun scanning.” Shotgun scanning implements a simplified format for combinatorial alanine scanning and utilizes phage-display libraries of alanine-substituted proteins for analysis (Morrison et al., “Combinatorial Alanine-Scanning,” Curr. Opin. Chem. Biol. 5:302-07 (2001), which is hereby incorporated by reference in its entirety). An alternative experimental approach suitable for use in the method of the present invention is covalent tethering, which is a process involving the use of equilibrium disulfide exchange to target potential binding partners within a specific region of the interface and calculate relative binding affinities (DeLano W., “Unraveling Hot Spots in Binding Interfaces: Progress and Challenges,” Curr. Opin. Struct. Biol. 12:14-20 (2002), which is hereby incorporated by reference in its entirety).

[0049] In addition to the experimental approaches for determining hot spot amino acids through alanine mutagenesis, predictive computational approaches have been developed that reproduce the experimental values with less time, effort, and expense. A number of algorithms and methods have been developed to accurately calculate the binding free energies of known three-dimensional structures and the effect of mutations on these affinities. Suitable methods include empirical knowledge-based (statistical) scoring approaches in conjunction with simple physical models (Moreira et al., “Computational Determination of the Relative Free Energy of Binding—Application to Alanine Scanning Mutagenesis in Molecular Material with Specific Interactions,” in MODELING AND DESIGN (Andrezej W. Sokalski ed., 2007), which is hereby incorporated by reference in its entirety), atomistic simulations including both the rigorous free energy perturbation and thermodynamic integration (Kollman P A, “Free Energy Calculations—Applications to Chemical and Biochemical Phenomena,” Chem. Rev. 93:2395-2417 (1993); Gouda et al., “Free Energy Calculations for Theophylline Binding to an RNA Aptamer: Comparison of MM-PBSA and Thermodynamic Integration Methods,” Biopolymers 68:16-34 (2002), which are hereby incorporated by reference in their entirety), protein cleft analysis combined with physical properties (Burgoyne et al., “Predicting Protein Interaction Sites: Binding Hot-Spots in Protein-Protein and Protein-Ligand Interfaces,” Bioinformatics 22(11):1335-1342 (2006), which is hereby incorporated by reference in its entirety). More approximate methods of identifying interface hot spot residues include MM-PBSA (Kollman et al., “Calculating Structures and Free Energies of Complex Molecules: Combining Molecular Mechanics and Continuum Models,” Acc. Chem. Res. 33:889-897 (2000), which is hereby incorporated by reference in its entirety), λ-dynamics (Kong et al., “Lambda Dynamics—A New Approach to Free Energy Calculations,” J. Chem. Phys. 105:2414-2423 (1996); Moreira et al., “Accuracy of the Numerical Solution of the Poisson-Boltzmann Equation,” J. Mol. Struct. 729:11-18 (2005); Moreira et al., “Hot Spots Computational Identification—Application to the Complex Formed Between the Hen Egg-White Lysozyme (HEL) and the Antibody HyHEL-10,” Int. J. Quantum Chem. 107:299-310 (2006), which are hereby incorporated by reference in their entirety), chemical Monte-Carlo/molecular mechanics (Moreira et al., “Accuracy of the Numerical Solution of the Poisson-Boltzmann Equation,” J. Mol. Struct. 729:11-18 (2005), which is hereby incorporated by reference in its entirety), and ligand interaction scanning (Moreira et al., “Hot Spots Computational Identification—Application to the Complex Formed Between the Hen Egg-White Lysozyme (HEL) and the Antibody HyHEL-10,” Int. J. Quantum Chem. 107:299-310 (2006), which is hereby incorporated by reference in its entirety).

[0050] The identity of interface hot spot residues can also be determined using other experimental approaches, including molecular biology based methods such as the yeast two-hybrid system, ubiquitin-based split-protein sensor, and Fluorescence Resonance Energy transfer; mass spectrometry methods; and protein microarrays.

[0051] In another embodiment of the present invention, the protein secondary structures at an interface of a two-chain inter-protein interaction are classified by the biological function(s) of the proteins involved in the respective interaction. This classification identifies new potential protein targets useful for targeted drug development and screening.

[0052] Another aspect of the present invention relates to a collection of isolated protein secondary structures that are at an interface of a two-chain inter-protein interaction, where the collection contains about 1%, about 5%, about 10%, about 20%, about 40%, about 60%, about 80%, or about 100% of the isolated protein secondary structures of Table 2. The representative collection of secondary structures at an interface of two-chain inter-protein interactions listed in Table 2 below was identified using the methods of the present invention. Redundant interactions have been removed from this collection to generate a non-redundant collection of two-chain inter-protein interactions having a secondary structure at their interface. In accordance with this aspect of the invention, the collection is a collection of helical protein secondary structures.

[0053] This collection of the present invention preferably contains m through n secondary structures, where m and n are integers and n is greater than m. Preferably, m is 2, 4, 8, 10, 50, 100, 200, 300, 400, 500, 600, 700, 800, 900, 1000, 1500, 2000, 2500, 3000, 3500, 4000, 4500, or 5000; and n is 10, 15, 50, 100, 200, 300, 400, 500, 600, 700, 800, 900, 1000, 1500, 2000, 2500, 3000, 3500, 4000, 4500, 5000, 5500, 6000, 6500, 7000, 7500, 8000, 8500, 9000, or 10000.

Lengthy table referenced here
US20100281003A1-20101104-T00001
Please refer to the end of the specification for access instructions.

[0054] As described supra, the collection of protein secondary structures that are at an interface of a two-chain inter-protein interaction can be classified by the biological function of the interacting proteins. These sub-collections of secondary structures at an interface of a two-chain inter-protein interaction provide targeted collections for identifying interactions that are suitable targets for therapeutic drug design and screening purposes. As shown in FIG. 5, the representative collection of secondary structures at an interface of a two-chain inter-protein interaction identified using the methods described herein can be classified into several functional categories.

[0055] In one embodiment of the present invention, the collection is a collection of protein secondary structures potentially involved in modulating the cell cycle. Table 3 below is a list of PDB entries taken from Table 2 that contain secondary structures at the interface of a two-chain inter-protein interaction that are potentially involved in modulating cell cycle. A preferred collection according to the present embodiment contains about 1%, about 5%, about 10%, about 20%, about 40%, about 60%, about 80%, or about 100% of the protein secondary structures that are present in the PDB entries identified in Table 3.

TABLE 3
Representative HIPP Interactions Involved in Cell Cycle

| CLASSIFICATION | PDB CODE |
|---|---|
| APOPTOSIS | 1D2Z, 1F3V, 1F9E, 1G5J, 1I3O, 1NW9, 1PQ1, 1TY4, |
| | 1ZY3, 2A5Y, 2G5B, 2JBY, 2JM6, 2K7W, 2NLA, 2OF5, |
| | 2P1L, 2PQK, 2PQN, 2PQR, 2ROC, 2ROD, 2V6Q, |
| | 2VOF, 2VOG, 2VOH, 2VOI, 2ZNE, 3D7V, 3EZQ, |
| | 3FDL, 3H11, 3I1H, 3YGS, 3EB6 |
| APOPTOSIS INHIBITOR/APOPTOSIS | 2K6Q, 1G73, 2PON |
| APOPTOSIS/HYDROLASE | 1I4O, 1KMC, 2FUN, 3F2O |
| CELL CYCLE | 1DOA, 1F47, 1GO4, 1I2M, 1N2D, 1N4M, 1OTR, 1R4M, |
| | 1SA0, 1XEW, 2AFF, 2CCI, 2DFK, 2DOQ, 2GGM, |
| | 2GV5, 2I3S, 2I3T, 2K2I, 2OBH, 2QYF, 2RAW, 2RAX, |
| | 2V4Z, 2VE7, 2W96, 3DAB, 3DAC, 3DBH, 3EAB, |
| | 3EUH, 3EUK, 3FDO, 3G03, 3G33, 3G65, 3GGR, 1KAT, |
| | 3C0R, 1G3N, 2AZE, 3FWB, 3FWC, 1IBR, 2ZXX, |
| | 1JOW, 1N4M |
| CELL CYCLE PROTEIN | 1M45, 1M46 |
| CELL CYCLE, STRUCTURAL PROTEIN | 2QAG |
| CELL CYCLE/CELL CYCLE/CELL CYCLE | 2QFA |
| CELL CYCLE/TRANSPORT PROTEIN | 3E1R |
| COMPLEX (CYTOKINE/RECEPTOR) | 1EER |
| COMPLEX (ONCOGENE PROTEIN/PEPTIDE) | 1YCR |
| KINASE/KINASE ACTIVATOR | 1H4L |
| LIGASE, CELL CYCLE | 2AST |
| TRANSFERASE/CELL CYCLE | 1OL5, 1WMH |
| OTHER | 1YCS, 1BXL, 1AON |

[0056] In another embodiment of the present invention, the collection is a collection of protein secondary structures potentially involved in modulating DNA binding. Table 4 below is a list of PDB entries taken from Table 2 that contain secondary structures at the interface of a two-chain inter-protein interaction that are potentially involved in modulating DNA binding. These two-chain inter-protein interactions include proteins that target DNA but are not involved in transcription. A preferred collection according to the present embodiment contains about 1%, about 5%, about 10%, about 20%, about 40%, about 60%, about 80%, or about 100% of the protein secondary structures that are present in the PDB entries identified in Table 4.

TABLE 4
Representative HIPP Interactions Involved in DNA Binding

| CLASSIFICATION | PDB CODE |
|---|---|
| DNA BINDING PROTEIN | 1L1O, 1N1J, 1OSV, 1T0F, 1UB4, 1UHL, 1XV9, 2A1J, |
| | 2BKY, 2HUE, 2NTI, 2O97, 3BQO, 3BU8, 3BUA, 3EI4, |
| | 3FPN, 1QUQ, 1VYJ, 2BYK |
| DNA BINDING PROTEIN, CHAPERONE | 3BTP |
| DNA BINDING PROTEIN/DNA | 1AKH, 1AOI, 1JEY, 1PH1, 2O8F, 2QSH, 3EI2 |
| DNA BINDING PROTEIN/RECOMBINATION/ | 1P4E |
| DNA | |
| DNA BINDING PROTEIN/TRANSFERASE | 1DML |
| HYDROLASE/DNA | 2D7D, 2PJR |
| ISOMERASE/DNA | 2B9S, 3FOE |
| LEUCINE ZIPPER | 1A93 |
| RECOMBINATION | 2V1C |
| REPLICATION | 1F2U, 1II8, 1P9D, 1SXJ, 1TUE, 1U7B, 2E9X, 2EHO, |
| | 2HII, 2HIK, 2IX2, 2PQA, 2Q9Q, 2R6C |
| REPLICATION, TRANSFERASE | 1ZT2 |
| REPLICATION, DNA BINDING PROTEIN | 2PI2, 1YYP |
| REPLICATION/DNA | 2QBY |
| REPLICATION/TRANSFERASE | 1ZT2, 1YYP |
| STRUCTURAL PROTEIN/DNA | 1EQZ, 1F66, 1ID3, 1KX4, 1U35, 1ZBB, 2F8N, 2FJ7, |
| | 2I0Q, 2NQB, 2NZD, 3C1B |
| TRANSCRIPTION, TRANSFERASE/DNA-RNA | 3ERC, 3GTM, 3HOU, 3HOY |
| HYBRID | |
| TRANSFERASE/DNA | 1RTD, 3GLI |
| TRANSFERASE/ELECTRON TRANSPORT/DNA | 1SKR |
| OTHER | 1AXC, 1BI4, 1JB7, 2VTB, 1H6K, 2ZYZ |

[0057] In another embodiment of the present invention, the collection is a collection of protein secondary structures potentially involved in modulating energy metabolism or enzymatic activity. Table 5 below is a list of PDB entries taken from Table 2 that contain secondary structures at the interface of a two-chain inter-protein interaction that are potentially involved in modulating energy metabolism or enzymatic activity. These two-chain inter-protein interactions include hydrolases, oxidoreductases, and transferases, among other enzymes. A preferred collection according to the present embodiment contains about 1%, about 5%, about 10%, about 20%, about 40%, about 60%, about 80%, or about 100% of the protein secondary structures that are present in the PDB entries identified in Table 5.

TABLE 5
Representative HIPP Interactions Involved in Energy Metabolism or Enzymatic Activity

| CLASSIFICATION | PDB CODE |
|---|---|
| ASPARTYL PROTEASE | 1LYW, 1AVF |
| ATP SYNTHASE | 1SKY |
| COMPLEX (METALLOPROTEASE/ | 1SMP, 1UEA |
| INHIBITOR) | |
| COMPLEX (PROTEASE/INHIBITOR) | 1HIA |
| COMPLEX (PROTEINASE/INHIBITOR) | 2SNI, 1SBN |
| COMPLEX (SERINE | 1A0H, 1AZZ, 1BCR, 1BTH, 1CA0, 1CBW, 1TBQ, 1CHO, 1CSE, |
| PROTEASE/INHIBITOR) | 1MEE, 1TEC, 4SGB |
| COMPLEX (TRANSFERASE/PEPTIDE) | 1A81 |
| DEHYDROGENASE | 1H0H |
| DIOXYGENASE | 1B4U |
| ELECTRON TRANSPORT | 1O96, 1BGY, 1EFP, 1EYS, 1KN1, 1O94, 1PHN, 1Z8U, 2AXT, |
| | 2C7J, 2JBL, 2JXM, 2PUK, 2PVG, 2PVO, 2QJK, 2QJP, 2UUN, |
| | 3A0B, 3BZ1, 1JJU, 3A0B, 3BZ1 |
| ELECTRON | 1FCD |
| TRANSPORT(FLAVOCYTOCHROME) | |
| GLYCOSIDASE | 2AAI |
| GLYCOSIDASE/CARBOHYDRATE | 1ABR |
| GLYCOSYLASE | 1UGH |
| HYDROGENASE | 1E08, 13DE |
| HYDROLASE | 1AOK, 1APY, 1AYY, 1B5F, 1CLV, 1CP9, 1E1H, 1E9Y, 1EJR, |
| | 1EUV, 1EZQ, 1FFU, 1FLC, 1FS0, 1FWA, 1FX0, 1FXW, 1G0U, |
| | 1GK0, 1HR8, 1HWM, 1ICF, 1ID5, 1IRU, 1IXR, 1IXS, 1JBU, 1JD2, |
| | 1JTG, 1K3B, 1KFU, 1KLI, 1N8O, 1N9G, 1NB3, 1NBF, 1NBW, |
| | 1NFU, 1NX0, 1OOK, 1OQS, 1OR0, 1OWS, 1OYV, 1P0S, 1PC8, |
| | 1Q5Q, 1Q5R, 1Q7L, 1QHH, 1R6O, 1RZO, 1S70, 1SCJ, 1SP4, |
| | 1T3M, 1V02, 1VZJ, 1W0Y, 1W1I, 1WPX, 1WYW, 1X3Z, 1XD3, |
| | 1XM4, 1XZP, 1Y75, 1YBQ, 1YM0, 1YU6, 1Z00, 2A1D, 2A7U, |
| | 2ADV, 2AYO, 2BFZ, 2BGN, 2BO9, 2BR2, 2C4F, 2CLY, 2CMY, |
| | 2CZV, 2D07, 2DD4, 2DFX, 2DOI, 2DXB, 2ES4, 2F43, 2F4O, |
| | 2FHH, 2GD4, 2GEZ, 2GJX, 2H4C, 2HD5, 2HLD, 2IAE, 2IBI, |
| | 2IOF, 2IUC, 2IZO, 2J0Q, 2J0S, 2J0T, 2J0U, 2J59, 2J5G, 2J7Q, |
| | 2J88, 2JE6, 2JEA, 2JET, 2JIZ, 2NGR, 2NP0, 2NYL, 2P2C, 2P3F, |
| | 2P9V, 2PV9, 2QE7, 2QKL, 2QKM, 2QL5, 2QOG, 2QY0, 2RD4, |
| | 2V7Q, 2VBL, 2VBN, 2VBO, 2VOY, 2VSK, 2WAX, 2WG8, 2WHP, |
| | 2WJV, 2Z2Y, 2ZAE, 2ZAL, 2ZCY, 2ZIV, 2ZIX, 2ZLE, 2ZU6, |
| | 3BGO, 3BN9, 3C5W, 3C91, 3D7W, 3DF0, 3DW8, 3E6P, 3EDQ, |
| | 3EDX, 3ESW, 3F6Z, 3F75, 3FKS, 3FSG, 3G9K, 3H4P, 3HKI, |
| | 3HKJ, 3I3T, 3UBP, 1AYY, 1IRU, 2HLD, 2VOY, 2ZCY, 2ZLE, |
| | 3C91 |
| HYDROLASE (SERINE PROTEASE) | 1EPT |
| HYDROLASE (SERINE PROTEINASE) | 1HLE, 1HRT, 1HPP |
| HYDROLASE ACTIVATOR | 1FNT, 1YA7, 1Z7Q, 2IY0 |
| HYDROLASE INHIBITOR/HYDROLASE | 1CQ4, 2H4P, 2H4Q, 3F02, 9PAI, 1TA3, 2NQD, 3F1S, 1B27, 1DP5, |
| | 1DPJ, 1DTD, 1EZX, 1F34, 1I51, 1IBX, 1LQM, 1SR5, 1WMI, |
| | 1XG2, 1Z7X, 1ZLH, 1ZLI, 2ABZ, 2D26, 2E2D, 2G2U, 2GKV, |
| | 2O3B, 2OUL, 2ZHX, 3B9F, 3BG4, 3BOW, 3CBJ, 3D4U, 3E2K, |
| | 1JIW |
| HYDROLASE(O-GLYCOSYL) | 1NCA |
| HYDROLASE/HYDROLASE ACTIVATOR | 1FNT, 1YA7, 1Z7Q, 2IY0 |
| HYDROLASE/HYDROLASE INHIBITOR | 1TA3, 2NQD, 3F1S, 1B27, 1DP5, 1DPJ, 1DTD, 1EZX, 1F34, 1I51, |
| | 1IBX, 1LQM, 1SR5, 1WMI, 1XG2, 1Z7X, 1ZLH, 1ZLI, 2ABZ, |
| | 2D26, 2E2D, 2G2U, 2GKV, 2O3B, 2OUL, 2ZHX, 3B9F, 3BG4, |
| | 3BOW, 3CBJ, 3D4U, 3E2K, 1JIW |
| HYDROLASE/HYDROLASE | |
| INHIBITOR/DNA | |
| HYDROLASE/INHIBITOR | 1EJM, 1GPQ, 1JTD, 1OC0, 1UDI, 1UUZ, 2BEX, 2J8X, 2O8A, |
| | 2VU8 |
| HYDROLASE/LIGASE | 2GWF |
| HYDROLASE/PROTEIN BINDING | 1NU7, 1NU9, 1V5I, 1ZNV, 2G4D, 2PT7, 1UPT |
| HYDROLASE/TRANSFERASE | 1FQ1, 2NN6, 3D6N |
| HYDROLASE/UNKNOWN FUNCTION | 3ENO |
| ISOMERASE | 1CB7, 1E1C, 1W2W, 1XRS, 2HP0, 2PV2, 2ZBK, 3FDZ |
| LIGASE | 1C4Z, 1EUC, 1FBV, 1FQV, 1FS1, 1FS2, 1FXT, 1JW9, 1LDK, |
| | 1U6G, 1UR6, 1Y8R, 1Y8X, 1Z56, 1Z5S, 2AKW, 2C4O, 2DF4, 2E |
| | 32, 2EJF, 2F9Y, 2GRN, 2NU9, 2O25, 2OOB, 2OXQ, 2RHS, 2VJE, |
| | 3D54, 3DQV, 3E 95, 3EQS, 3FN1, 3FSH, 3H0L |
| LIGHT HARVESTING COMPLEX | 1LGH, 1CPCP, 1LIA, 1ALL |
| LUMINESCENCE | 2G2S, 2GW4 |
| LYASE | 1AHJ, 1BXN, 1DIO, 1GXS, 1I1Q, 1I7M, 1I7Q, 1IBT, 1IR2, 1IRE, |
| | 1IWA, 1IWP, 1LVC, 1MHM, 1MT1, 1NBU, 1NZY, 1P7T, 1PYU, |
| | 1QDL, 1RCO, 1S0Y, 1SVD, 1UHE, 1UZD, 1UZH, 1V29, 1WDD, |
| | 1WDW, 1YSL, 1ZQ1, 2AL2, 2DPP, 2FYM, 2QCD, 2QQD, 2UZ1, |
| | 2VLH, 3DTV, 3ET6, 3GZD |
| LYASE (CARBON-CARBON) | 1RLD, 4RUB |
| LYASE, OXIDOREDUCTASE/TRANSFERASE | 1WDK |
| LYASE/OXIDOREDUCTASE | 1NVM |
| LYASE/TRANSFERASE | 2ISS |
| METHANOGENESIS | 1HBM |
| MOLYBDENUM-IRON PROTEIN | 1MIO |
| MONOOXYGENASE | 1MTY |
| OXIDOREDUCTASE | 1BCC, 1BIQ, 1BVY, 1CC1, 1DGH, 1DII, 1E6E, 1E6V, 1E6Y, |
| | 1E7P, 1EO2, 1EP3, 1F6M, 1FFT, 1FIQ, 1FYZ, 1G20, 1G72, 1G8K, |
| | 1GX7, 1H1L, 1H2A, 1H2R, 1H4J, 1JK0, 1JK9, 1JMX, 1JNR, 1JRO, |
| | 1JZD, 1KF6, 1KFY, 1KQF, 1LRW, 1M1Y, 1M56, 1MG2, 1MHY, |
| | 1MJG, 1N5W, 1NHG, 1NI4, 1NTK, 1OAO, 1OIJ, 1Q16, 1R1R, |
| | 1R27, 1RM6, 1SB3, 1SQB, 1SQX, 1T0Q, 1T3Q, 1TI2, 1ULI, |
| | 1UM9, 1USP, 1V54, 1VRQ, 1VRS, 1WQL, 1WYU, 1XLT, 1XME, |
| | 1Y56, 1YE9, 1YKK, 1YQ3, 1ZOY, 1ZY8, 2AFH, 2BMO, 2BP7, |
| | 2BRU, 2BS4, 2CKF, 2D0V, 2DE5, 2E1M, 2EQ7, 2EQ9, 2FBW, |
| | 2FOI, 2FRV, 2FUG, 2FYN, 2GAG, 2GBW, 2H9A, 2HT9, 2IBZ, |
| | 2IFQ, 2INN, 2INP, 2IVF, 2J55, 2J57, 2J7A, 2JGD, 2K9F, 2O8V, |
| | 2PKQ, 2QJY, 2R00, 2UW1, 2V1S, 2V3B, 2V4J, 2VDC, 2VL2, |
| | 2VR0, 2VRC, 2VVL, 2VYN, 2WD7, 2WD7, 2WME, 3B9J, 3BLW, |
| | 3BMC, 3C75, 3C7B, 3CF4, 3CWB, 3CXH, 3DHH, 3DMT, 3DTU, |
| | 3E7S, 3E9J, 3EH3, 3EN1, 3ETR, 3EUB, 3EXG, 3EXH, 3FGC, |
| | 3GE8, 3HRD, 1G20, 2P80, 1ZRT |
| OXIDOREDUCTASE COMPLEX | 2RII |
| OXIDOREDUCTASE, TRANSFERASE | 3DUF, 1J31 |
| OXIDOREDUCTASE/BIOSYNTHETIC | 1Z5Y, 2FHS |
| PROTEIN | |
| OXIDOREDUCTASE/ELECTRON | 1KYO, 1NEK, 2A1T, 2ACZ, 2YVJ, 2ZON, 1T9G, 2GC4, 2A1T |
| TRANSPORT | |
| OXIDOREDUCTASE/PROTEIN BINDING | 2F5Z |
| OXIDOREDUCTASE/TRANSCRIPTION | 2UXN |
| REGULATOR | |
| PHOSPHOTRANSFERASE | 1GLA, 1KI6 |
| PHOTOSYNTHESIS | 1B33, 1B8D, 1EYX, 1F99, 1GH0, 1I7Y, 1IJD, 1IZL, 1JB0, 1K6L, |
| | 1L9B, 1L9J, 1Q90, 1QGW, 1S5L, IVF5, 1W5C, 2BV8, 2E 74, 2JIY, |
| | 2JJ0, 2O01, 2VJH, 2VJT, 2VML, 2ZT9, 3DBJ |
| POLYMERASE | 2C35 |
| PROTEIN BINDING/TRANSFERASE | 2A78, 2OV2 |
| SERINE PROTEASE | 1DY8, 2HNT |
| SERINE PROTEINASE | 1DX5 |
| TRANSERASE, TOXIN | 1S5E |
| TRANSFERASE | 1BUH, 1CF4, 1D8D, 1DCE, 1F3M, 1F51, 1F5Q, 1F80, 1FM0, |
| | 1GO3, 1H5R, 1IW7, 1JQJ, 1JR3, 1KA9, 1MU2, 1N4Q, 1N8Z, |
| | 1N95, 1O2F, 1OW7, 1P16, 1POI, 1Q95, 1S78, 1TN6, 1TQY, 1U54, |
| | 1VRA, 1VYW, 1W98, 1XPK, 1XXH, 1XXI, 1Y14, 1YNJ, 1Z7M, |
| | 1ZUN, 2A3I, 2B8K, 2B9I, 2BE7, 2BE9, 2BOV, 2BTW, 2C52, |
| | 2DBU, 2DRN, 2EG4, 2F49, 2F9I, 2FEW, 2FHJ, 2FTK, 2GHO, |
| | 2GOO, 2HHF, 2HWN, 2HY5, 2HYB, 2I2X, 2IDO, 2IFG, 2J0M, |
| | 2JGZ, 2NNW, 2NPT, 2O2V, 2ONL, 2OQ1, 2PA8, 2QIE, 2QM6, |
| | 2QR1, 2R5C, 2RF4, 2RF9, 2V1Y, 2V36, 2V4I, 2V55, 2V5Q, 2V8Q, |
| | 2VDU, 2VDW, 2VGO, 2VJM, 2WEL, 3A1G, 3BWN, 3C66, 3C72, |
| | 3CDK, 3CR3, 3D7U, 3DRA, 3E0J, 3E8C, 3EZB, 3FDS, 3FHI, |
| | 3FLO, 3GLH, 3GM1, 3GTU, 3H1C, 3HGK, 3HKZ, 3HPG, 1IW7, |
| | 1LTX, 1HVU |
| TRANSFERASE/HYDROLASE | 2BCJ, 2CG5 |
| OTHER | 1OE9, 1BXR, 1AJS, 1BJO, 1NWD, 2BCX, 1CDL, 1PON, 1SY9, |
| | 2BBM, 1CFF, 1CKK, 1CKN, 2PCF, 1AY7, 1DHK, 1TOC, 1TCO, |
| | 1IBC, 1A4Y, 1AVZ, 1BGX, 1YCP, 1SPB, 1JSU, 1DAN, 1AW8, |
| | 2HZE, 1QFN, 3CFA, 1BPL, 2QAR, 2QB0, 1MF8, 2FHX, 1M63, |
| | 1ONK, 1F96, 2GMI, 2K2Q, 3C14, 1XFU, 1XFV, 1GPW, 2NV2, |
| | 1RYP, 1NDO, 1HMV, 1OCC, 1MMO, 2V1D, 5CSC, 1HBH, 1PRC, |
| | 1PSS, 1FPP, 1PMA, 2PE6, 2QHO, 1EGP, 2BKR, 1E 44, 1CAX |

[0058] A sub-collection of the collection of protein secondary structures potentially involved in modulating enzymatic activity is a collection of protein secondary structures at the interface of two-chain inter-protein interactions that include kinases. A representative collection of secondary structures that are at an interface of a two-chain inter-protein interaction that includes a kinase is shown in Table 6 below. The specific amino acid interface residues comprising the helical structures at the interface of the two-chain inter-protein interaction are also shown in Table 6. These, along with other helical structures at an interface of a kinase, are also included in Table 2.

TABLE 6
Interface Residues of the Secondary Structure
Inter-Protein Interaction for Representative Kinases

| PDB CODE | PARTNER | CHAIN | NUMBER | RESIDUES | SEQ ID NO: |
|---|---|---|---|---|---|
| 1BLX | B | A | 104 to 112 | DLTTYLDKV | 22206 |
| 1BLX | A | B | 5 to 19 | VCVGDRLSGAR | 22207 |
| 1BLX | A | B | 44 to 48 | TALNV | 22208 |
| 1BLX | A | B | 76 to 84 | SPVHDAART | 22209 |
| 1KDX | B | A | 597 to 611 | QDLRSHLVHKLVQAI | 22210 |
| 1KDX | B | A | 646 to 664 | RDEYYHLLAEKIYKIQKEL | 22211 |
| 1KDX | A | B | 119 to 131 | TDSQKRREILSRR | 22212 |
| 1KDX | A | B | 134 to 145 | YRKILNDLSSDA | 22213 |
| 1OW6 | D | A | 1011 to 1046 | VIDSLQQEYKKQMLTAHALAVDAKN | 22214 |
| | | | | LLDQARLKM | |
| 1OW6 | A | D | 2 to 13 | TRELDELMASLS | 22215 |
| 1OW6 | F | C | 949 to 975 | EYVPMVKEVGLALRTLATVDETIPLP | 22216 |
| 1OW6 | F | C | 981 to 1007 | REIEMAQKLLNSDLGELINKMKLAQQY | 22217 |
| 1OW6 | C | F | 2 to 12 | TRELDELMASL | 22218 |
| 1WMH | B | A | 73 to 88 | SQLELEEAFRLYE | 22219 |
| 1WMH | A | B | 38 to 51 | GFQEFSRLLRAVHQIPG | 22220 |
| 1YJ5 | C | B | 227 to 242 | PAEVFKGKVEAVLEKL | 22221 |
| 2A19 | A | B | 489 to 500 | FETSKFFTDLRD | 22222 |
| 2CH4 | W | A | 497 to 501 | VSEVS | 22223 |
| 2CH4 | A | W | 507 to 517 | MDVVKNVVESL | 22224 |
| 2CH4 | B | Y | 140 to 145 | KIIEEI | 22225 |
| 2EHB | D | A | 33 to 46 | EEVEALYELFKLS | 22226 |
| 2EHB | D | A | 58 to 65 | EEFQLALF | 22227 |
| 2EHB | D | A | 74 to 83 | FADRIFDVFD | 22228 |
| 2EHB | D | A | 93 to 102 | GEFVRSLGVF | 22229 |
| 2EHB | D | A | 109 to 120 | HEKVKFAFKLYD | 22230 |
| 2EHB | D | A | 130 to 143 | EELKEMVALHES | 22231 |
| 2EHB | D | A | 150 to 164 | DMIEVMVDKAFVQAD | 22232 |
| 2EHB | D | A | 174 to 183 | DEWKDFVSLN | 22233 |
| 2EHB | A | D | 311 to 318 | NAFEMITL | 22234 |
| 2GIT | F | D | 57 to 84 | PEYWEGETRKVKAHSQTHARV | 22235 |
| | | | | DLGTLRGY | |
| 2GIT | F | D | 138 to 149 | MAQTTKHKWEA | 22236 |
| 2GIT | F | D | 152 to 160 | VAEQLRAYL | 22237 |
| 2GIT | F | D | 162 to 174 | GTCVEWLRRYLEN | 22238 |
| 2NPT | D | A | 74 to 95 | SDEEMKAMLSYYSTVMEQQVN | 22239 |
| 2NPT | B | C | 75 to 95 | DEEMKAMLSYYSTVMEQQVN | 22240 |

[0059] In another embodiment of the present invention, the collection is a collection of protein secondary structures potentially involved in modulating immune system function. Table 7 below is a list of PDB entries taken from Table 2 that contain secondary structures at the interface of a two-chain inter-protein interaction that are potentially involved in modulating immune system function. A preferred collection according to the present embodiment contains about 1%, about 5%, about 10%, about 20%, about 40%, about 60%, about 80%, or about 100% of the protein secondary structures that are present in the PDB entries identified in Table 7.

TABLE 7
Representative HIPP Interactions Involved in Immune Function

| CLASSIFICATION | PDB CODE |
|---|---|
| ANTIBIOTIC/IMMUNE SYSTEM | 1XKM |
| ANTIBODY | 1BFO, 1CE1, 1HEZ, 1UWE, 1GHF, 1JTO |
| ANTITUMOR PROTEIN | 1JM7, 1GH6, 1T2V |
| BLOOD CLOTTING | 1I5K, 1J9C, 1JMO, 1JOU, 1JY2, 1LQ8, 1LWU, 1M1J, |
| | 1N73, 1N86, 1SDD, 1SQ0, 1U0N, 1XMN, 2A45, |
| | 2B5T, 2FFD, 2HOD, 2PUQ, 2VVC, 3BVH, 3GHG, |
| | 3H32, 2ODY, 2ADF |
| CATALYTIC ANTIBODY | 15C8, 1KEL, 1YED |
| CIRCADIAN CLOCK PROTEIN | 1SUY, 1U9I |
| COAGULATION FACTOR | 1RFN, 1IXX, 1E0F |
| COMPLEX (ANTIBODY/PEPTIDE) | 1SM3, 2HIP |
| COMPLEX (IMMUNOGLOBULIN/LIPOPROTEIN) | 1OS0 |
| COMPLEX | 1NFD |
| (IMMUNORECEPTOR/IMMUNOGLOBULIN) | |
| COMPLEX (OXIDOREDUCTASE/ANTIBODY) | 1AR1 |
| COMPLEX(ANTIBODY-ANTIGEN) | 1BJ1, 1FBI, 1FCC, 2JEL, 1JHL, 3HFM |
| HISTOCOMPATIBILITY ANTIGEN I-AK | 1IAK |
| HYDROLASE, BLOOD CLOTTING, TOXIN | 2E3X |
| HYDROLASE, BLOOD CLOTTING | 2H9E, 3ENS |
| HYDROLASE/IMMUNE SYSTEM | 1T6V, 1ZV5, 1ZVY, 3D9A, 3G3A, 3G3B, 3H42 |
| IMMUNE SYSTEM | 1OQD, 1BM3, 1BX2, 1BZ7, 1C12, 1C5B, 1C5D, |
| | 1CL7, 1CT8, 1CU4, 1CZ8, 1D9K, 1DEE, 1DN0, |
| | 1DQQ, 1DZB, 1ED3, 1EFX, 1EJO, 1ETZ, 1F11, 1F3D, |
| | 1F3J, 1F4W, 1F90, 1FE8, 1FG9, 1FH5, 1FJ1, 1FL5, |
| | 1FN4, 1FNS, 1FSK, 1FYH, 1G0Y, 1H0T, 1HDM, |
| | 1HQ4, 1HQR, 1HYR, 1I1A, 1I3R, 1I7Z, 1IL1, 1IM9, |
| | 1J8H, 1JGL, 1JGV, 1JL4, 1JNH, 1JNL, 1JPS, 1K8I, |
| | 1KC5, 1KCG, 1KCS, IKFA, 1KJ2, 1KN2, 1KTD, |
| | 1KTK, 1L0X, 1L7T, 1LK3, 1LO0, 1LO4, 1LP1, 1LP9, |
| | 1LQS, 1MEX, 1MHP, 1MI5, 1MUJ, 1MVF, 1MWA, |
| | 1N0X, 1NAK, 1NC2, 1ND0, 1NGW, 1NJ9, 1NL0, |
| | 1OEY, 1OQO, 1P4B, 1PG7, 1PZ5, 1Q1J, 1Q72, 1Q9O, |
| | 1Q9W, 1R24, 1RHH, 1RIH, 1RJL, 1RZ7, 1RZF, 1RZG, |
| | 1RZI, 1S3K, 1S9V, 1SEQ, 1T4K, 1T66, 1TZH, 1TZI, |
| | 1U3H, 1UM4, 1UWX, 1UYW, 1W72, 1XCQ, 1XCT, |
| | 1XGP, 1YMM, 1YNK, 1YNT, 1YPZ, 1YY8, 1Z92, |
| | 1ZA6, 1ZAN, 1ZGL, 2A9M, 2AAB, 2ADG, 2AGJ, |
| | 2AI0, 2AJ3, 2AJZ, 2AK4, 2AP2, 2AQ1, 2ARJ, 2BC4, |
| | 2BDN, 2BRR, 2CMR, 2D03, 2DQT, 2E7L, 2EH8, |
| | 2ESV, 2F54, 2FJF, 2FL5, 2FX8, 2G2R, 2G60, 2G75, |
| | 2G9H, 2GJZ, 2GSI, 2HFG, 2HH0, 2HWZ, 2I26, 2I26, |
| | 2IAM, 2IAN, 2ICE, 2ICW, 2IPK, 2IPU, 2J5L, 2NNA, |
| | 2NOJ, 2NTF, 2NX5, 2O5X, 2OI9, 2OJZ, 2OQJ, 2OSL, |
| | 2P24, 2PXY, 2Q6W, 2Q86, 2Q8A, 2QEJ, 2QKI, 2QR0, |
| | 2RD7, 2UYL, 2V17, 2V7H, 2V7N, 2VL5, 2VLJ, |
| | 2VLR, 2VOL, 2VQ1, 2VWE, 2VXU, 2VXV, 2VYR, |
| | 2W65, 2W80, 2W9E, 2WBJ, 2WII, 2WIN, 2Z4Q, |
| | 2Z7X, 2Z8V, 2Z91, 2ZCK, 2ZPK, 32C2, 3BKJ, 3BKY, |
| | 3BQU, 3BT2, 3BZ4, 3C8K, 3CDG, 3CFB, 3CFD, |
| | 3CFK, 3CLE, 3CMO, 3CUP, 3CVH, 3D0L, 3D5O, |
| | 3D69, 3DGG, 3DIF, 3DVG, 3DXA, 3E3Q, 3E8U, |
| | 3EFD, 3EYF, 3EYQ, 3FFC, 3G04, 3G6A, 3G6D, 3G6J, |
| | 3GIZ, 3GJF, 3HAE, 3HC0, 3HE6, 3HE7, 3HG1, 3HNS, |
| | 3HRZ, 3HS0, 3HUJ, 3I2C, 7CEI, 1UVQ, 3GKW, |
| | 2FD6, 2FHZ, 2FSE, 3H0T, 2H9G, 1IQD, 1UJ3, 1Z3G, |
| | 3EOA, 1V7N, 2ERJ, 3D85, 3DUH, 3EO1, 1CBV, |
| | 1KEG, 2FR4, 3FFD, 3F8U, 1HH9, 1YJD, 1ZA3, |
| | 1HXY, 1LO5, 3ETB, 3B2U, 3GKW, 2FD6, 2FHZ, |
| | 2FSE, 1D9K, 1I3R, 1ZGL, 2GJ7, 2VXQ, 2JTT, 1TH1, |
| | 3FCS, 3FCU, 2GOX, 1XL3, 1IGC, 1WEJ, 1FPT, |
| | 1FDL, 2VIR, 1BVK, 1IAI, 1A2Y, 1NSN, 1MPA, |
| | 2HRP, 1AHW, 2SEB, 1SEB, 1AQD, 1AO7, 1BD2, |
| | 1UCY, 1ACY, 1KXV, 3EIQ, 1RIW, 1TB6, 1IAO, |
| | 1SBS, 1QLE, 1J34, 1QO3, 1QO3, 1OVA, 2Q97, 1FRT, |
| | 1UCY |
| IMMUNE SYSTEM RECEPTOR | 2BNQ |
| IMMUNE SYSTEM, HYDROLASE | 1C08, 1H0D, 1RI8, 1RJC, 2DQF, 2ZNW, 3EBA |
| IMMUNE SYSTEM/VIRAL PROTEIN | 2DD8, 2I9L, 2QHR, 3CSY, 1GHQ, 2GJ7 |
| IMMUNOGLOBULIN | 1A3L, 1A4J, 1A6T, 1AD0, 1AD9, 1AE6, 1AJ7, 1AXT, |
| | 1BAF, 1CIC, 1CLO, 1CLY, 1DBA, 1DFB, 1FAI, |
| | 1FOR, 1GGI, 1IBG, 1IGF, 1IGT, 1IND, 1MCP, 1MFB, |
| | 1MIM, 1NLD, 1PLG, 1PSK, 1TET, 1VGE, 1YUH, |
| | 2FBJ, 2FGW, 2GFB, 2PCP, 7FAB, 12E8 |
| ISOMERASE | 1CB7, 1E1C, 1W2W, 1XRS, 2HP0, 2PV2, 2ZBK, |
| | 3FDZ |
| ISOMERASE/IMMUNE SYSTEM | 3F8U |
| TOXIN/IMMUNE SYSTEM | 2NTS |
| TRANSFERASE/ANTIBODY/DNA | 1T03 |
| TRANSFERASE/IMMUNE SYSTEM/DNA | 3GRW |

[0060] In another embodiment of the present invention, the collection is a collection of protein secondary structures potentially involved in modulating cell membrane proteins or receptor interactions. Table 8 below is a list of PDB entries taken from Table 2 that contain secondary structures at the interface of a two-chain inter-protein interaction that are potentially involved in modulating cell membrane proteins or receptor interactions. A preferred collection according to the present embodiment contains about 1%, about 5%, about 10%, about 20%, about 40%, about 60%, about 80%, or about 100% of the protein secondary structures that are present in the PDB entries identified in Table 8.

TABLE 8
Representative HIPP Interactions of Membrane Proteins and Receptors

| CLASSIFICATION | PDB CODE |
|---|---|
| CELL RECEPTOR | 2CDE, 2CDF, 2CDG |
| LECTIN | 1LEN, 1LOC, 1LOF, 2B7Y |
| LIPID BINDING PROTEIN | 2PO6 |
| MEMBRANE PROTEIN | 1C17, 1EF1, 1H2S, 1K4C, 1KIL, 1ORQ, 1ORS, 1QD6, |
| | 1R3I, 1RPQ, 2A0L, 2A79, 2BE6, 2EXW, 2F93, 2F95, |
| | 2H8P, 2J8S, 2K9J, 2NZ0, 2ONK, 2QAC, 2QI9, 2VT1, |
| | 3B5N, 3C4M, 3C5J, 3CHX, 3DVE, 3EFF, 3EHU, 1Q68, |
| | 2RMK, 2FKW, 3BXK, 3CSL |
| MEMBRANE PROTEIN, IMMUNE SYSTEM, | 2F2L |
| TOXIN | |
| MEMBRANE PROTEIN, PROTEIN TRANSPORT | 3BZL, 3C01, 3C03, 3DIN, 2R9R |
| MEMBRANE PROTEIN, TRANSFERASE | 2FFF |
| MEMBRANE PROTEIN, PROTEIN BINDING | 2ODG, 1P8D |
| MEMBRANE PROTEIN/CHAPERON | 1XKP |
| MEMBRANE PROTEIN/HYDROLASE | 1P8V, 3DHW |
| MEMBRANE PROTEIN/MEMBRANE | 3DIN |
| TRANSPORT | |
| OXIDOREDUCTASE, MEMBRANE PROTEIN | 1YEW |
| OXYGEN BINDING | 2R1H, 2RAO |
| PROTEIN BINDING/PROTEIN TRANSPORT | 1VF6, 1VG0, 1VG9 |
| RECEPTOR | 2BYP, 2UZ6 |
| RECEPTOR/GLYCOPROTEIN | 2V5P |
| SUGAR BINDING PROTEIN | 1GGP, 1LNU, 1PUM, 3C5Z, 3C60, 3C6L, 1NMU |
| OTHER | 2PRG, 1A6A, 2SIV, 1GZL, 2IY1, 2J9D, 1RSO, 2HLF, |
| | 2FYL |

[0061] In another embodiment of the present invention, the collection is a collection of protein secondary structures potentially involved in modulating other protein binding or have an unknown function. Table 9 below is a list of PDB entries taken from Table 2 that contain secondary structures at the interface of a two-chain inter-protein interaction that are potentially involved in modulating other protein binding or have an unknown function. A preferred collection according to the present embodiment contains about 1%, about 5%, about 10%, about 20%, about 40%, about 60%, about 80%, or about 100% of the protein secondary structures that are present in the PDB entries identified in Table 9.

TABLE 9
Representative HIPP Interactions Involved in Other Protein Binding or Unknown Function

| CLASSIFICATION | PDB CODE |
|---|---|
| BINDING PROTEIN | 1QO0 |
| BIOSYNTHETIC PROTEIN | 1TO9, 1TYG, 2HTM, 2Z2L, 2ZC5, 1RF8, 2ZU0, 1ZM2 |
| COMPLEX (BLOOD COAGULATION/PEPTIDE) | 1MKW |
| COMPLEX | 1EBD |
| (OXIDOREDUCTASE/TRANSFERASE) | |
| COMPLEX (PEPTIDE BINDING | 1X11 |
| MODULE/PEPTIDE) | |
| DE NOVO PROTEIN | 1KD8, 1KDD, 1XOF, 1ZSZ, 1BB1, 2OTK, 1SVX |
| IMMUNE SYSTEM | 1OQD, 1BM3, 1BX2, 1BZ7, 1C12, 1C5B, 1C5D, 1CL7, |
| | 1CT8, 1CU4, 1CZ8, 1D9K, 1DEE, 1DN0, 1DQQ, |
| | 1DZB, 1ED3, 1EFX, 1EJO, 1ETZ, 1F11, 1F3D, 1F3J, |
| | 1F4W, 1F90, 1FE8, 1FG9, 1FH5, 1FJ1, 1FL5, 1FN4, |
| | 1FNS, 1FSK, 1FYH, 1G0Y, 1H0T, 1HDM, 1HQ4, |
| | 1HQR, 1HYR, 1I1A, 1I3R, 1I7Z, 1IL1, 1IM9, 1J8H, |
| | 1JGL, 1JGV, 1JL4, 1JNH, 1JNL, 1JPS, 1K8I, 1KC5, |
| | 1KCG, 1KCS, 1KFA, 1KJ2, 1KN2, 1KTD, 1KTK, |
| | 1L0X, 1L7T, 1LK3, 1LO0, 1LO4, 1LP1, 1LP9, 1LQS, |
| | 1MEX, 1MHP, 1MI5, 1MUJ, 1MVF, 1MWA, 1N0X, |
| | 1NAK, 1NC2, 1ND0, 1NGW, 1NJ9, 1NL0, 1OEY, |
| | 1OQO, 1P4B, 1PG7, 1PZ5, 1Q1J, 1Q72, 1Q9O, 1Q9W, |
| | 1R24, 1RHH, 1RIH, 1RJL, 1RZ7, 1RZF, 1RZG, 1RZI, |
| | 1S3K, 1S9V, 1SEQ, 1T4K, 1T66, 1TZH, 1TZI, 1U3H, |
| | 1UM4, 1UWX, 1UYW, 1W72, 1XCQ, 1XCT, 1XGP, |
| | 1YMM, 1YNK, 1YNT, 1YPZ, 1YY8, 1Z92, 1ZA6, |
| | 1ZAN, 1ZGL, 2A9M, 2AAB, 2ADG, 2AGJ, 2AI0, |
| | 2AJ3, 2AJZ, 2AK4, 2AP2, 2AQ1, 2ARJ, 2BC4, 2BDN, |
| | 2BRR, 2CMR, 2D03, 2DQT, 2E7L, 2EH8, 2ESV, 2F54, |
| | 2FJF, 2FL5, 2FX8, 2G2R, 2G60, 2G75, 2G9H, 2GJZ, |
| | 2GSI, 2HFG, 2HH0, 2HWZ, 2I26, 2I26, 2IAM, 2IAN, |
| | 2ICE, 2ICW, 2IPK, 2IPU, 2J5L, 2NNA, 2NOJ, 2NTF, |
| | 2NX5, 2O5X, 2OI9, 2OJZ, 2OQJ, 2OSL, 2P24, 2PXY, |
| | 2Q6W, 2Q86, 2Q8A, 2QEJ, 2QKI, 2QR0, 2RD7, 2UYL, |
| | 2V17, 2V7H, 2V7N, 2VL5, 2VLJ, 2VLR, 2VOL, 2VQ1, |
| | 2VWE, 2VXU, 2VXV, 2VYR, 2W65, 2W80, 2W9E, |
| | 2WBJ, 2WII, 2WIN, 2Z4Q, 2Z7X, 2Z8V, 2Z91, 2ZCK, |
| | 2ZPK, 32C2, 3BKJ, 3BKY, 3BQU, 3BT2, 3BZ4, 3C8K, |
| | 3CDG, 3CFB, 3CFD, 3CFK, 3CLE, 3CMO, 3CUP, |
| | 3CVH, 3D0L, 3D5O, 3D69, 3DGG, 3DIF, 3DVG, |
| | 3DXA, 3E3Q, 3E8U, 3EFD, 3EYF, 3EYQ, 3FFC, 3G04, |
| | 3G6A, 3G6D, 3G6J, 3GIZ, 3GJF, 3HAE, 3HC0, 3HE6, |
| | 3HE7, 3HG1, 3HNS, 3HRZ, 3HS0, 3HUJ, 3I2C, 7CEI, |
| | 1UVQ, 3GKW, 2FD6, 2FHZ, 2FSE, 3H0T, 2H9G, |
| | 1IQD, 1UJ3, 1Z3G, 3EOA, 1V7N, 2ERJ, 3D85, 3DUH, |
| | 3EO1, 1CBV, 1KEG, 2FR4, 3FFD, 3F8U, 1HH9, 1YJD, |
| | 1ZA3, 1HXY, 1LO5, 3ETB, 3B2U, 3GKW, 2FD6, |
| | 2FHZ, 2FSE, 1D9K, 1I3R, 1ZGL, 2GJ7, 2VXQ, 2JTT, |
| | 1TH1, 3FCS, 3FCU, 2GOX, 1XL3, 1IGC, 1WEJ, 1FPT, |
| | 1FDL, 2VIR, 1BVK, 1IAI, 1A2Y, 1NSN, 1MPA, 2HRP, |
| | 1AHW, 2SEB, 1SEB, 1AQD, 1AO7, 1BD2, 1UCY, |
| | 1ACY, 1KXV, 3EIQ, 1RIW, 1TB6, 1IAO, 1SBS, 1QLE, |
| | 1J34, 1QO3, 1QO3, 1OVA, 2Q97, 1FRT, 1UCY |
| METAL BINDING PROTEIN | 1MXE, 1PSB, 1XK4, 1Z6O, 2HQW, 2K2F, 2O60, |
| | 2OGX, 2ZFB, 3G43, 2H61, 2H0D, 1QS7, 1IQ5, 1IWQ, |
| | 2JU0, 1YR5, 1ZUZ, 2BEC, 2E 30, 2FOT, 2JJZ, 2W73 |
| PEPTIDE BINDING PROTEIN | 2IHS |
| PLANT PROTEIN | 1DGR, 1DGW, 2DS2, 2Q3N |
| PROTEIN BINDING | 1IZN, 1L0O, 1OQP, 1X2T, 1YFN, 1ZL8, 1ZW3, 2ASQ, |
| | 2B87, 2DEN, 2DZN, 2FYZ, 2HYE, 2I94, 2IJ0, 2K3S, |
| | 2K8B, 2O98, 2ODB, 2R1T, 2VDB, 2ZL1, 3B71, 3CK4, |
| | 3CRP, 3DA7, 3DXC, 3F1I, 3GMW, 1ZL8 |
| TRANSFERASE/PROTEIN BINDING | 1LTX, 2QLV |
| UNKNOWN FUNCTION | 1J7D, 1TPX, 2UVP, 2UYN, 2VH3, 3FXD, 2JND, 1QLS, |
| | 3PRO, 2V8F, 3MON |

[0062] In another embodiment of the present invention, the collection is a collection of protein secondary structures potentially involved in modulating protein synthesis or turnover. Table 10 below is a list of PDB entries taken from Table 2 that contain secondary structures at the interface of a two-chain inter-protein interaction that are potentially involved in modulating protein synthesis or turnover. These two-chain inter-protein interactions include chaperone proteins, proteosomes, ribosomes, and the like. A preferred collection according to the present embodiment contains about 1%, about 5%, about 10%, about 20%, about 40%, about 60%, about 80%, or about 100% of the protein secondary structures that are present in the PDB entries identified in Table 10.

TABLE 10
Representative HIPP Interactions Involved in Protein Folding and Turnover

| CLASSIFICATION | PDB CODE |
|---|---|
| CHAPERONE | 1DKD, 1FXK, 1HT1, 1JYO, 1L2W, 1LZW, 1PCQ, |
| | 1TTW, 1USV, 1WE3, 1XQS, 2C2V, 2CG9, 2D0O, 2JKI, |
| | 2K5B, 2UWJ, 2VGX, 2ZDI, 3CQX, 3D2E, 3GZ1 |
| CHAPERONE, PROTEIN TRANSPORT | 2GUZ |
| CHAPERONE, STRUCTURAL, MEMBRANE | 3BUW, 1ZE3 |
| PROTEIN | |
| CHAPERONE/CELL INVASION | 2FM8 |
| COMPLEX (HSP24/HSP70) | 1DKG |
| COMPLEX OF TWO ELONGATION FACTORS | 1EFU, 1AIP |
| HISTONE/CHAPERONE | 3CFV |
| HYDROLASE/TRANSLATION | 2VSO |
| PROTEASOME ACTIVATOR | 1AVO |
| PROTEIN SYNTHESIS/TRANSFERASE | 2A19 |
| PROTEIN TURNOVER/PROTEIN TURNOVER | 2DYM |
| RIBOSOME | 1CE7, 1DD4, 1G1X, 1HR0, 1I94, 1IBL, 1JJ2, 1KQS, |
| | 1N34, 1PNS, 1Q86, 1QVF, 1S1H, 1T0K, 1VOQ, 1VQN, |
| | 1VQP, 1VS5, 1VS6, 1VSA, 1VSP, 1W2B, 1XMQ, |
| | 1YL3, 1YL4, 2B9M, 2D3O, 2E5L, 2GY9, 2GYA, 2HGI, |
| | 2HGJ, 2HGP, 2HGR, 2HHH, 2I2P, 2I2T, 2J01, 2J03, |
| | 2J28, 2J37, 2OM7, 2OTJ, 2QA4, 2QBE, 2QEX, 2QOU, |
| | 2QOW, 2QOY, 2QP0, 2V46, 2VHM, 2VHN, 2VHO, |
| | 2WDI, 2WH1, 2WH2, 2WH4, 2ZJQ, 3BBN, 3BBO, |
| | 3BO0, 3CMA, 3D5A, 3D5B, 3D5D, 3DEG, 3F1E, 3F1F, |
| | 3FIC, 3FIH, 3FIK, 3FIN, 3G4S |
| RIBOSOME INHIBITOR | 3DD7 |
| RIBOSOME INHIBITOR, HYDROLASE | IJCH |
| STRUCTURAL PROTEIN/CHAPERONE | 1XOU |
| TRANSFERASE/RIBOSOMAL PROTEIN | 3CJS, 3CJT |
| TRANSLATION | 1EJH, 1F60, 1RK8, 1RY1, 1XB2, 2D1P, 2D74, 2GID, |
| | 2HDN, 2JGB, 2QMU, 2V8W, 3CW2, 3E1Y |
| TRANSLATION/IMMUNE SYSTEM | 1SYX |
| TRANSLATION/RNA | 2GJE, 2GO5 |
| OTHER | 2GGP, 3C7N, 1HX1, 1G3I, 1G4B, 1YYF, 2Z5C, 2JSS, |
| | 2PQ4, 2IO5, 2NVU, 2FIF, 2PMZ, 1WKW |

[0063] In another embodiment of the present invention, the collection is a collection of protein secondary structures potentially involved in modulating RNA binding. Table 11 below is a list of PDB entries taken from Table 2 that contain secondary structures at the interface of a two-chain inter-protein interaction that are potentially involved in modulating RNA binding. A preferred collection according to the present embodiment contains about 1%, about 5%, about 10%, about 20%, about 40%, about 60%, about 80%, or about 100% of the protein secondary structures that are present in the PDB entries identified in Table 11.

TABLE 11
Representative HIPP Interactions Involved in RNA Binding

| CLASSIFICATION | PDB CODE |
|---|---|
| HYDROLASE | 1AOK, 1APY, 1AYY, 1B5F, 1CLV, 1CP9, 1E1H, 1E9Y, 1EJR, |
| | 1EUV, 1EZQ, 1FFU, 1FLC, 1FS0, 1FWA, 1FX0, 1FXW, 1G0U, |
| | 1GK0, 1HR8, 1HWM, 1ICF, 1ID5, 1IRU, 1IXR, 1IXS, 1JBU, |
| | 1JD2, 1JTG, 1K3B, 1KFU, 1KLI, 1N8O, 1N9G, 1NB3, 1NBF, |
| | 1NBW, 1NFU, 1NX0, 1OOK, 1OQS, 1OR0, 1OWS, 1OYV, |
| | 1P0S, 1PC8, 1Q5Q, 1Q5R, 1Q7L, 1QHH, 1R6O, 1RZO, 1S70, |
| | 1SCJ, 1SP4, 1T3M, 1V02, 1VZJ, 1W0Y, 1W1I, 1WPX, 1WYW, |
| | 1X3Z, 1XD3, 1XM4, 1XZP, 1Y75, 1YBQ, 1YM0, 1YU6, 1Z00, |
| | 2A1D, 2A7U, 2ADV, 2AYO, 2BFZ, 2BGN, 2BO9, 2BR2, |
| | 2C4F, 2CLY, 2CMY, 2CZV, 2D07, 2DD4, 2DFX, 2DOI, |
| | 2DXB, 2ES4, 2F43, 2F4O, 2FHH, 2GD4, 2GEZ, 2GJX, 2H4C, |
| | 2HD5, 2HLD, 2IAE, 2IBI, 2IOF, 2IUC, 2IZO, 2J0Q, 2J0S, |
| | 2J0T, 2J0U, 2J59, 2J5G, 2J7Q, 2J88, 2JE6, 2JEA, 2JET, 2JIZ, |
| | 2NGR, 2NP0, 2NYL, 2P2C, 2P3F, 2P9V, 2PV9, 2QE7, 2QKL, |
| | 2QKM, 2QL5, 2QOG, 2QY0, 2RD4, 2V7Q, 2VBL, 2VBN, |
| | 2VBO, 2VOY, 2VSK, 2WAX, 2WG8, 2WHP, 2WJV, 2Z2Y, |
| | 2ZAE, 2ZAL, 2ZCY, 2ZIV, 2ZIX, 2ZLE, 2ZU6, 3BGO, 3BN9, |
| | 3C5W, 3C91, 3D7W, 3DF0, 3DW8, 3E6P, 3EDQ, 3EDX, |
| | 3ESW, 3F6Z, 3F75, 3FKS, 3FSG, 3G9K, 3H4P, 3HKI, 3HKJ, |
| | 3I3T, 3UBP, 1AYY, 1IRU, 2HLD, 2VOY, 2ZCY, 2ZLE, 3C91 |
| HYDROLASE/RNA | 3DD2 |
| HYDROLASE/RNA BINDING | 2HYI, 3EX7 |
| PROTEIN/RNA | |
| ISOMERASE/BIOSYNTHETIC | 2HVY, 3HAX, 3HAY, 2EY4 |
| PROTEIN/RNA | |
| ISOMERASE/RNA | 2RFK, 3HJW, 3HJY |
| LIGASE/RNA | 1EIY |
| LIGASE/RNA BINDING PROTEIN | 2HRK, 2HSN |
| RIBOSOME | 1CE7, 1DD4, 1G1X, 1HR0, 1I94, 1IBL, 1JJ2, 1KQS, 1N34, |
| | 1PNS, 1Q86, 1QVF, 1S1H, 1T0K, 1VOQ, 1VQN, 1VQP, 1VS5, |
| | 1VS6, 1VSA, 1VSP, 1W2B, 1XMQ, 1YL3, 1YL4, 2B9M, |
| | 2D3O, 2E5L, 2GY9, 2GYA, 2HGI, 2HGJ, 2HGP, 2HGR, |
| | 2HHH, 2I2P, 2I2T, 2J01, 2J03, 2J28, 2J37, 2OM7, 2OTJ, 2QA4, |
| | 2QBE, 2QEX, 2QOU, 2QOW, 2QOY, 2QP0, 2V46, 2VHM, |
| | 2VHN, 2VHO, 2WDI, 2WH1, 2WH2, 2WH4, 2ZJQ, 3BBN, |
| | 3BBO, 3BO0, 3CMA, 3D5A, 3D5B, 3D5D, 3DEG, 3F1E, 3F1F, |
| | 3FIC, 3FIH, 3FIK, 3FIN, 3G4S |
| RNA BINDING PROTEIN | 1D3B, 1JGN, 1JH4, 1JMT, 1N52, 1NT2, 1O0P, 1P27, 1Y96, |
| | 2BA0, 2BA1, 2DT7, 2F9D, 2FHO, 1UW4, 2J98, 2UY1, 2W2H |
| RNA BINDING PROTEIN/RNA | 1A9N, 2OZB |
| STRUCTURAL PROTEIN/RNA | 1YSH |
| TRANSFERASE/RNA | 1HVU |
| OTHER | 2APO, 2ZKR, 3CM8 |

[0064] In another embodiment of the present invention, the collection is a collection of protein secondary structures potentially involved in modulating cell signaling. Table 12 below is a list of PDB entries taken from Table 2 that contain secondary structures at the interface of a two-chain inter-protein interaction that are potentially involved in modulating cell signaling. A preferred collection according to the present embodiment contains about 1%, about 5%, about 10%, about 20%, about 40%, about 60%, about 80%, or about 100% of the protein secondary structures that are present in the PDB entries identified in Table 12.

TABLE 12
Representative HIPP Interactions Involved in Cell Signalling

| CLASSIFICATION | PDB CODE |
|---|---|
| ALU RIBONUCLEOPROTEIN PARTICLE | 1E8O |
| CELL CYCLE | 1DOA, 1F47, 1GO4, 1I2M, 1N2D, 1N4M, 1OTR, 1R4M, |
| | 1SA0, 1XEW, 2AFF, 2CCI, 2DFK, 2DOQ, 2GGM, 2GV5, |
| | 2I3S, 2I3T, 2K2I, 2OBH, 2QYF, 2RAW, 2RAX, 2V4Z, |
| | 2VE7, 2W96, 3DAB, 3DAC, 3DBH, 3EAB, 3EUH, 3EUK, |
| | 3FDO, 3G03, 3G33, 3G65, 3GGR |
| CIRCADIAN CLOCK PROTEIN | 1SUY, 1U9I |
| COMPLEX (GTP-BINDING/TRANSDUCER) | 1GG2, 1GOT, 1TBG |
| COMPLEX (INHIBITOR PROTEIN/KINASE) | 1BI8 |
| COMPLEX (SIGNAL | 1TCE |
| TRANSDUCTION/PEPTIDE) | |
| CYTOKINE | 1ES7, 1I1R, 1ICE, 1PGR, 2K03, 2PSM, 2VXS, 2VXT, 3D87 |
| CYTOKINE/CYTOKINE RECEPTOR | 2Q7N, 2B5I, 2Z3R, 3BPL, 3BPN, 3BPO, 3DI2, 3G9V |
| CYTOKINE/RECEPTOR | 1J7V, 2QJ9 |
| CYTOKINE/SIGNALING PROTEIN | 2O26, 3DGC, 3EJJ |
| G PROTEIN | 1ZBD |
| HORMONE | 1A7F, 1PID, 1VKT, 2K6T, 2K91, 2KBC, 2OM0, 3BDY, |
| | 3FUB, 7INS, 2FJH, 1M2Z |
| HORMONE RECEPTOR | 2ZSH, 3HHR, 3D48 |
| HORMONE(MUSCLE RELAXANT) | 6RLX |
| HORMONE/GROWTH FACTOR | 1BP3, 1BSX, 1K3M, 1KF9, 1M4U, 1PMX, 1RDT, 1T1K, |
| | 1XWD, 2ARP, 2GH0, 2H62, 2H67, 2H8B, 2NXX, 2OCF |
| HORMONE/GROWTH FACTOR RECEPTOR | 1DKF, 1QTY, 1R1K, 1R20, 1XDK, 1Z5X, 1RV6 |
| HORMONE/GROWTH FACTOR/HORMONE | 1F6F |
| RECEPTOR | |
| HORMONE/GROWTH | 2FDB |
| FACTOR/TRANSFERASE | |
| HORMONE/HORMONE RECEPTOR | 3D48 |
| HORMONE/SIGNALING PROTEIN | 3C9A |
| HYDROLASE/PROTEIN-BINDING | 1NU7, 1NU9, 1V5I, 1ZNV, 2G4D, 2PT7, 1UPT |
| INSULIN-LIKE BRAIN-SECRETORY | 1BOM |
| PEPTIDE | |
| ION CHANNEL/RECEPTOR | 1OED, 2BG9 |
| ISOMERASE/SIGNALING PROTEIN | 1X75 |
| LIGASE/SIGNALING PROTEIN | 2JMF |
| NERVE GROWTH FACTOR/TRKA | 1WWW |
| COMPLEX | |
| PROTEIN BINDING/HORMONE/GROWTH | 2DSQ, 2DSR |
| FACTOR | |
| PROTEIN-BINDING | 1IZN, 1L0O, 1OQP, 1X2T, 1YFN, 1ZL8, 1ZW3, 2ASQ, |
| | 2B87, 2DEN, 2DZN, 2FYZ, 2HYE, 2I94, 2IJ0, 2K3S, 2K8B, |
| | 2O98, 2ODB, 2R1T, 2VDB, 2ZL1, 3B71, 3CK4, 3CRP, |
| | 3DA7, 3DXC, 3F1I, 3GMW |
| PROTEIN-BINDING/HYDROLASE | 2IO1 |
| SIGNALING PROTEIN | 1B9X, 1CC0, 1CXZ, 1DEV, 1DS6, 1EMU, 1FQJ, 1G4U, |
| | 1G4Y, 1HE1, 1HV2, 1I4D, 1JDP, 1JJO, 1KI1, 1KJY, 1KMI, |
| | 1KZ7, 1LB1, 1MDU, 1MR1, 1NF3, 1OO0, 1OXK, 1P22, |
| | 1R5V, 1R5W, 1S1C, 1SHZ, 1T0J, 1U0S, 1U7F, 1U8T, |
| | 1WR1, 1XD2, 1Y3A, 1YOV, 1Z2C, 1ZC4, 2BAP, 2BBA, |
| | 2BWE, 2FHW, 2FU5, 2GCO, 2GTP, 2H7V, 2HJ9, 2IHB, |
| | 2IK8, 2JY6, 2K42, 2NTY, 2ODE, 2P1N, 2P6A, 2PBI, 2QQK, |
| | 2QQN, 2R4R, 2RIV, 2VRW, 2WG3, 2ZET, 3BH6, 3BJI, |
| | 3C7K, 3CX6, 3EG5, 3EDL, 3FAL, 3HO5, 1HL6, 3C59, |
| | 3F6Q, 3GNI, 2PL9, 1E0A, 2CNW, 1EAY, 1XCG, 2RGN, |
| | 1FOE, 2NZ8, 2IE3, 2NPP, 1T34, 2PK9, 2POP, 1P9M, 1PVH, |
| | 2D9Q, 3HH2, 3CF6, 1HH4, 1NIW, 1K5D, 2ZVN, 3GCG |
| SIGNALING PROTEIN/CELL ADHESION | 3D1M |
| SIGNALING PROTEIN, MEMBRANE | 1X86, 3BS5 |
| PROTEIN | |
| SIGNALING PROTEIN, TRANSFERASE | 1IB1, 2OZA, 2QME, 2ZFD, 2EHB |
| SIGNALING PROTEIN/APOPTOSIS | 2FJU |
| SIGNALING PROTEIN/HORMONE | 2QKH |
| SIGNALING PROTEIN/HYDROLASE | 2QIY, 2W2X, 3DOE |
| SIGNALING PROTEIN/LIPOPROTEIN | 2REX |
| SIGNALING PROTEIN/TRANSPORT | 3BC1 |
| PROTEIN | |
| TRANSFERASE/HORMONE | 2E9W |
| TRANSFERASE/SIGNALING PROTEIN | 2AUH, 3CZU, 3DGE, 3HEI |
| OTHER | 1A0O, 1CM1, 1AM4, 1GUA, 1WQ1, 1B6C, 1BI7, 1EFN, |
| | 1AGR, 1TX4, 1F45, 1I9R, 3EVS, 1EM8, 1KV6, 1L8C, |
| | 1LQB, 1S4Z, 1YKE, 2CZY, 2QXV, 2VPD, 2VPE, 2VPG, |
| | 1IYJ, 1MIU, 1N0W, 1MJE, 1CQT, 1D3U, 2H1O, 1IK9, |
| | 1UEL, 1OW3, 3A1Q, 2FO1, 3BRW, 1CN4, 3B4V, 2WC0, |
| | 2JRI, 2ZNV, 1H59, 3H9R, 1O9U, 2IZX, 1NEX, 1CUL, |
| | 2DWZ, 3EQY, 3FMO, 3FMP, 1KPE, 2RD0 |

[0065] In another embodiment of the present invention, the collection is a collection of protein secondary structures potentially involved in modulating cell structure or cellular adhesion. Table 13 below is a list of PDB entries taken from Table 2 that contain secondary structures at the interface of a two-chain inter-protein interaction that are potentially involved in modulating cell structure or cellular adhesion. A preferred collection according to the present embodiment contains about 1%, about 5%, about 10%, about 20%, about 40%, about 60%, about 80%, or about 100% of the protein secondary structures that are present in the PDB entries identified in Table 13.

TABLE 13
Representative HIPP Interactions Involved in Cell Structure or Adhesion

| CLASSIFICATION | PDB CODE |
|---|---|
| CELL ADHESION | 1DOW, 1I7W, 1J19, 1JPW, 1KUP, 1L5G, 1OHZ, 1QZ7, |
| | 1SYQ, 1TYE, 1U6H, 2CCL, 2D10, 2EMT, 2OZ4, 2P28, |
| | 2VN5, 2VZD, 2VZG, 2VZI, 2YVC, 3H2U, 3H2V, |
| CELL ADHESION, STRUCTURAL PROTEIN | 1RKE, 1YDI, 2GWW, 2IBF |
| CELL ADHESION/IMMUNE SYSTEM | 2VDN, 2VDO |
| COMPLEX (SKELETAL MUSCLE/MUSCLE | 1A2X |
| PROTEIN) | |
| CONTRACTILE PROTEIN | 1C0G, 1DFK, 1DFL, 1I84, 1J1D, 1J1E, 1M8Q, 1MVW, |
| | 1O18, 1QVI, 1RGI, 1YAG, 1YTZ, 1YV0, 2AKA, 2EC6, |
| | 2EKV, 2OS8, 3DTP, 1DFK, 1I84, 1J1E, 1M8Q, 1MVW, |
| | 1O18, 2EC6, 3DTP, 3B63 |
| CYTOSKELETAL PROTEIN | 2BTO |
| HYDROLASE/STRUCTURAL PROTEIN | 2B59, 2Z0E |
| MOTOR PROTEIN | 2KIN, 2VAS, 3DCO, 3KIN, 3H4S, 2BKI |
| MUSCLE PROTEIN | 1BR1, 1WDC, 2BL0 |
| STRUCTURAL PROTEIN/CONTRACTILE | 2FF6, 2V51, 2V52 |
| PROTEIN | |
| OTHER | 1H1V, 1XWJ, 1HLU, 2IX7, 1KXP, 3B63, 2DFS, 2AUS, |
| | 1MTP, 2G38, 2OPL, 3H6P, 3HHL, 1H8B, 1LUJ, 1M1E, |
| | 1MDU, 1MK9, 1MWN, 1NPQ, 1OZS, 1T60, 1Y64, 1ZAV, |
| | 2A40, 2A4J, 2ACM, 2BTQ, 2G9J, 2H7D, 2HL5, 2PBD, |
| | 2PG1, 2WBE, 3BYH, 3CHW, 3CIP, 3CJB, 3DWL, 3EDL, |
| | 3F3P, 2FV4, 2KBR, 3F7P, 3CJC, 1SQK, 3DAW, 1CJF |

[0066] In another embodiment of the present invention, the collection is a collection of protein secondary structures from toxins, viruses, or bacteria. Table 14 below is a list of PDB entries taken from Table 2 that contain secondary structures at the interface of a two-chain inter-protein interaction that are from toxins, viruses, or bacteria. A preferred collection according to the present embodiment contains about 1%, about 5%, about 10%, about 20%, about 40%, about 60%, about 80%, or about 100% of the protein secondary structures that are present in the PDB entries identified in Table 14.

TABLE 14
Representative HIPP Interactions of Toxins, Viruses, and Bacteria

| CLASSIFICATION | PDB CODE |
|---|---|
| ANTIBIOTIC RESISTANCE | 1E3A |
| BACTERIAL CELL DIVISION INHIBITOR | 1OFU |
| ENTEROTOXIN | 1HTL, 1LT4, 1TII |
| PROTEIN BINDING/TOXIN | 2O02 |
| PROTEIN BINDING/VIRAL PROTEIN | 2BL5 |
| PROTEIN BINDING/VIRUS/DNA | 1ZLA |
| TOXIN | 1BCP, 1ECI, 1KVD, 1PTO, 1R4P, 1R4Q, 1SB2, 1SR4, |
| | 1WQ9, 1XTC, 1XTG, 2F2F, 2OZN, 2ZOE, 3BPQ, 3BX4, |
| | 1TZN, 1UEX, 1GZS, 1HC9, 3BUZ, 2KC8, 1PTO |
| TOXIN INHIBITOR/TOXIN | 2A6Q |
| TOXIN/ANTITOXIN | 3DBO, 3G5O, 3H87 |
| TOXIN/PROTEIN BINDING | 2NYD |
| TOXIN/TOXIN INHIBITOR | 1TFO |
| TUBERCULOSIS | 1WA8 |
| VIRAL PROTEIN | 1C8O, 1FAV, 1G2C, 1JEK, 1JMU, 1JSD, 1JSM, 1M93, |
| | 1QRJ, 1RD8, 1RU7, 1RUY, 1RUZ, 1SVF, 1T6O, 1TI8, 1ZV8, |
| | 2BEQ, 2BEZ, 2FK0, 2GOL, 2H1L, 2IBX, 2RFT, 3DNL, |
| | 3DS3, 3EPC, 3EPD, 3EPF, 3EYJ, 3EYM, 3GBM, 1JXP, |
| | 2NZ1, 2Z2T, 3HHZ, 3CL3 |
| VIRAL PROTEIN, RECOMBINATION | 2B4J, 3F9K |
| VIRAL PROTEIN, REPLICATION | 2AHM |
| VIRAL PROTEIN/TRANSLATION | 1LJ2 |
| VIRAL PROTEIN/APOPTOSIS | 3BL2, 3DVU |
| VIRAL PROTEIN/IMMUNE SYSTEM | 1A3R, 1AFV, 1EO8, 1F58, 1FRG, 1G9M, 1KEN, 1KG0, |
| | 1QFU, 1YYL, 1ZTX, 2B4C, 2NY7, 2QAD, 3BGF, 3FKU, |
| | 3GBN |
| VIRAL PROTEIN/NUCLEAR PROTEIN | 2RHK |
| VIRAL PROTEIN/SIGNALING PROTEIN | 3CL3 |
| VIRUS | 1AL0, 1B35, 1BBT, 1BEV, 1D4M, 1EAH, 1EV1, 1FMD, |
| | 1NY7, 1OOP, 1PIV, 1POV, 1R1A, 1RHI, 1TME, 1UF2, |
| | 1Z7S, 1Z8Y, 1ZBA, 2BTV, 2MEV, 2QQP, 2W0C, 3CJI, |
| | 3GZU, 1QGC, 1RVF |
| VIRUS/DNA | 2BPA |
| VIRUS/RECEPTOR | 1V9U, 1Z7Z, 2JIK |
| VIRUS/RNA | 1BMV, 1F8V, 2BBV, 2Q26 |
| OTHER | 2GYK, 2PF4, 2PKG, 2AJF, 1YRT, 3DCG, 1N 0V |

[0067] In another embodiment of the present invention, the collection is a collection of protein secondary structures potentially involved in modulating gene transcription. Table 15 below is a list of PDB entries taken from Table 2 that contain secondary structures at the interface of a two-chain inter-protein interaction that are potentially involved in modulating gene transcription. These two-chain inter-protein interactions include transcriptional activators, repressors, or other components of the transcription machinery. A preferred collection according to the present embodiment contains about 1%, about 5%, about 10%, about 20%, about 40%, about 60%, about 80%, or about 100% of the protein secondary structures that are present in the PDB entries identified in Table 15.

TABLE 15
Representative HIPP Interactions Involved in Transcription

| CLASSIFICATION | PDB CODE |
|---|---|
| IMMUNE SYSTEM | 1OQD, 1BM3, 1BX2, 1BZ7, 1C12, 1C5B, 1C5D, 1CL7, 1CT8, 1CU4, |
| | 1CZ8, 1D9K, 1DEE, 1DN0, 1DQQ, 1DZB, 1ED3, 1EFX, 1EJO, 1ETZ, |
| | 1F11, 1F3D, 1F3J, 1F4W, 1F90, 1FE8, 1FG9, 1FH5, 1FJ1, 1FL5, |
| | 1FN4, 1FNS, 1FSK, 1FYH, 1G0Y, 1H0T, 1HDM, 1HQ4, 1HQR, |
| | 1HYR, 1I1A, 1I3R, 1I7Z, 1IL1, 1IM9, 1J8H, 1JGL, 1JGV, 1JL4, |
| | 1JNH, 1JNL, 1JPS, 1K8I, 1KC5, 1KCG, 1KCS, 1KFA, 1KJ2, 1KN2, |
| | 1KTD, 1KTK, 1L0X, 1L7T, 1LK3, 1LO0, 1LO4, 1LP1, 1LP9, 1LQS, |
| | 1MEX, 1MHP, 1MI5, 1MUJ, 1MVF, 1MWA, 1N0X, 1NAK, 1NC2, |
| | 1ND0, 1NGW, 1NJ9, 1NL0, 1OEY, 1OQO, 1P4B, 1PG7, 1PZ5, 1Q1J, |
| | 1Q72, 1Q9O, 1Q9W, 1R24, 1RHH, 1RIH, 1RJL, 1RZ7, 1RZF, 1RZG, |
| | 1RZI, 1S3K, 1S9V, 1SEQ, 1T4K, 1T66, 1TZH, 1TZI, 1U3H, 1UM4, |
| | 1UWX, 1UYW, 1W72, 1XCQ, 1XCT, 1XGP, 1YMM, 1YNK, 1YNT, |
| | 1YPZ, 1YY8, 1Z92, 1ZA6, 1ZAN, 1ZGL, 2A9M, 2AAB, 2ADG, |
| | 2AGJ, 2AI0, 2AJ3, 2AJZ, 2AK4, 2AP2, 2AQ1, 2ARJ, 2BC4, 2BDN, |
| | 2BRR, 2CMR, 2D03, 2DQT, 2E7L, 2EH8, 2ESV, 2F54, 2FJF, 2FL5, |
| | 2FX8, 2G2R, 2G60, 2G75, 2G9H, 2GJZ, 2GSI, 2HFG, 2HH0, 2HWZ, |
| | 2I26, 2I26, 2IAM, 2IAN, 2ICE, 2ICW, 2IPK, 2IPU, 2J5L, 2NNA, |
| | 2NOJ, 2NTF, 2NX5, 2O5X, 2OI9, 2OJZ, 2OQJ, 2OSL, 2P24, 2PXY, |
| | 2Q6W, 2Q86, 2Q8A, 2QEJ, 2QKI, 2QR0, 2RD7, 2UYL, 2V17, 2V7H, |
| | 2V7N, 2VL5, 2VLJ, 2VLR, 2VOL, 2VQ1, 2VWE, 2VXU, 2VXV, |
| | 2VYR, 2W65, 2W80, 2W9E, 2WBJ, 2WII, 2WIN, 2Z4Q, 2Z7X, 2Z8V, |
| | 2Z91, 2ZCK, 2ZPK, 32C2, 3BKJ, 3BKY, 3BQU, 3BT2, 3BZ4, 3C8K, |
| | 3CDG, 3CFB, 3CFD, 3CFK, 3CLE, 3CMO, 3CUP, 3CVH, 3D0L, |
| | 3D5O, 3D69, 3DGG, 3DIF, 3DVG, 3DXA, 3E3Q, 3E8U, 3EFD, |
| | 3EYF, 3EYQ, 3FFC, 3G04, 3G6A, 3G6D, 3G6J, 3GIZ, 3GJF, 3HAE, |
| | 3HC0, 3HE6, 3HE7, 3HG1, 3HNS, 3HRZ, 3HS0, 3HUJ, 3I2C, 7CEI, |
| | 1UVQ, 3GKW, 2FD6, 2FHZ, 2FSE, 3H0T, 2H9G, 1IQD, 1UJ3, 1Z3G, |
| | 3EOA, 1V7N, 2ERJ, 3D85, 3DUH, 3EO1, 1CBV, 1KEG, 2FR4, 3FFD, |
| | 3F8U, 1HH9, 1YJD, 1ZA3, 1HXY, 1LO5, 3ETB, 3B2U, 3GKW, |
| | 2FD6, 2FHZ, 2FSE, 1D9K, 1I3R, 1ZGL, 2GJ7 |
| TRANSCRIPTION | 1CI6, 1E 50, 1F3U, 1F93, 1FM6, 1FMH, 1G1E, 1HQM, 1I3Q, 1K3Z, |
| | 1K74, 1K7L, 1KBH, 1KKQ, 1L3E, 1LKY, 1MK2, 1MZN, 1NIK, |
| | 1NRL, 1ONV, 1OR7, 1OVL, 1PD7, 1PZL, 1R2B, 1RP3, 1S5R, 1SB0, |
| | 1SV0, 1TFC, 1TIL, 1U2U, 1VCB, 1WCM, 1XLS, 1YOK, 1ZDT, |
| | 2ACL, 2AGH, 2BZW, 2D5R, 2DVQ, 2E3K, 2FEP, 2FMM, 2GL7, |
| | 2GPP, 2GPV, 2GS0, 2HZM, 2HZS, 2IZV, 2JBA, 2JF9, 2JFA, 2K7L, |
| | 2NNU, 2NPI, 2NS8, 2NZU, 2O9I, 2P7V, 2PHE, 2PHG, 2Q0O, 2RMS, |
| | 2RNR, 2V5H, 2VUS, 2WAQ, 2WB1, 2Z2S, 2ZNL, 3BLH, 3BP8, |
| | 3C0T, 3D24, 3D3C, 3DGP, 3DOM, 3E1K, 3F5C, 3FBI |
| TRANSCRIPTION | 1H2M |
| ACTIVATOR/INHIBITOR | |
| TRANSCRIPTION REGULATION | 1UTB, 1YUC, 2CPW |
| TRANSCRIPTION REGULATION | 1BH8, 1KDX |
| COMPLEX | |
| TRANSCRIPTION REGULATOR | 1B0N, 2KA4, 2KA6, 2P5T, 3BEJ, 3C8G |
| TRANSCRIPTION REPRESSION | 1PK1 |
| TRANSCRIPTION REPRESSOR, CELL | 3BIM |
| CYCLE | |
| TRANSCRIPTION, TRANSCRIPTIONREGULATION | 3ECH |
| TRANSCRIPTION, TRANSFERASE/DNA- | 3ERC, 3GTM, 3HOU, 3HOY |
| RNA HYBRID | |
| TRANSCRIPTION/CELL CYCLE | 2OVQ |
| TRANSCRIPTION/DNA | 1A02, 1AWC, 1C9B, 1CF7, 1FOS, 1IHF, 1IO4, 1JFI, 1JFI, 1MDY, |
| | 1MNM, 1NGM, 1NH2, 1NKP, 1NLW, 1NVP, 1O4X, IR0N, 1RIO, |
| | 1RM1, 1S9K, 1T2K, 1XS9, 1ZVV, 2F8X, 2HAN, 2QL2, 2R5Y, 3DZU |
| TRANSCRIPTION/PROTEIN | 1TQE |
| BINDING/DNA | |
| TRANSCRIPTION/TBP-ASSOCIATED | 1H3O |
| FACTORS | |
| TRANSCRIPTION/TRANSFERASE | 1P4Q, 1XIU, 1ZOQ, 3GFK |
| TRANSCRIPTIONAL COACTIVATOR | 1OJH |
| TRANSFERASE/TRANSCRIPTION | 2JZB, 2K8F, 2WIU, 3BRT, 3BRV |
| OTHER | 1TBA, 3HQR, 1SSE, 2AVU, 1L2I, 3EU7, 1ZHI, 1R8U, 3DCT, 1RZR, |
| | 2AJQ |

[0068] In another embodiment of the present invention, the collection is a collection of protein secondary structures potentially involved in modulating cellular transport. Table 16 below is a list of PDB entries taken from Table 2 that contain secondary structures at the interface of a two-chain inter-protein interaction that are potentially involved in modulating cellular transport. A preferred collection according to the present embodiment contains about 1%, about 5%, about 10%, about 20%, about 40%, about 60%, about 80%, or about 100% of the protein secondary structures that are present in the PDB entries identified in Table 16.

TABLE 16
Representative HIPP Interactions Involved in Transport

| CLASSIFICATION | PDB CODE |
|---|---|
| ENDOCYTOSIS | 1W63, 2JKR, 2JXC, 2IV8, 2G3Q |
| ENDOCYTOSIS/EXOCYTOSIS | 1JTH, 1L4A, 2EQB, 2G30, 2OCY, 2PJW, 2PJX, 3C98 |
| EXOCYTOSIS | 2CJS, 3HD7 |
| HYDROLASE ACTIVATOR/PROTEIN | 2G77 |
| TRANSPORT | |
| HYDROLASE/TRANSPORT PROTEIN | 2R6G, 2ZXE, 3B8E |
| LIPID TRANSPORT/ENDOCYTOSIS/ | 2FCW |
| CHAPERONE | |
| METAL BINDING PROTEIN/TRANSPORT | 2BEC, 2E30 |
| PROTEIN | |
| METAL TRANSPORT | 1EXB, 1SUV |
| METAL TRANSPORT, HYDROLASE | 2PMS, 3CJK |
| METAL TRANSPORT, MEMBRANE | 2A5T |
| PROTEIN | |
| OXIDOREDUCTASE/LIPID TRANSPORT | 3EJB |
| OXIDOREDUCTASE/METAL | 1WX5, 1ZRT |
| TRANSPORT | |
| OXYGEN STORAGE, OXYGEN | 2RI4, 3D4X, 3DHR, 3DHT, 3FS4, 1XQ5 |
| TRANSPORT | |
| OXYGEN STORAGE/TRANSPORT | 1FHJ, 1FSX, 1GCV, 1HBR, 1HV4, 1JEB, 1JY7, 1V4U, 1V75, |
| | 1XQ5, 1Y8H, 1YHU, 2AA1, 2D2M, 2GTL |
| OXYGEN TRANSPORT | 1A9W, 1CG5, 1FDH, 1HDS, 1OUU, 1QPW, 1SCT, 2W72, |
| | 3FH9, 3HRW |
| PROTEIN TRANSPORT | 1J2J, 1NRJ, 1R4A, 1RE0, 1RH5, 1RJ9, 1TU3, 1UKV, 1W7P, |
| | 1X79, 1YHN, 1Z0J, 1Z0K, 2BSK, 2C5I, 2D3G, 2D7C, 2GZD, |
| | 2H4M, 2HV8, 2J9U, 2JDQ, 2JQ9, 2JQK, 2K3W, 2K8M, 2NUP, |
| | 2OT3, 2PM6, 2QTV, 2QTV, 2R17, 2RET, 2V6X, 2V8S, 2VDA, |
| | 2VGL, 2W83, 2W84, 2W85, 2ZME, 3CI0, 3CJH, 3CPH, 3CPJ, |
| | 3CQC, 3CQG, 3CUE, 3CUQ, 3DL8, 3DXR, 3EZJ, 3GJX, |
| | 1YD8, 1UKL, 2ZJS, 3CFI, 2C1M, 3DKN, 1M2O, 1WR6, |
| | 1WRD, 2FNJ, 2A5D |
| PROTEIN TRANSPORT, HYDROLASE | 3BG0 |
| PROTEIN TRANSPORT, MEMBRANE | 3DEP |
| PROTEIN | |
| PROTEIN TRANSPORT, ANTIMICROBIAL | 2HDI |
| PROTEIN | |
| PROTEIN TRANSPORT/EXCHANGE | 1R8Q |
| FACTOR | |
| PROTEIN TRANSPORT/SPLICING | 3BBP |
| TRANSPORT PROTEIN | 2J3R, 2J3W, 1IA0, 1JN5, 1MO1, 1S6C, 1SFC, 1T3L, 1U5T, |
| | 1URQ, 1VYT, 1Y74, 1Y76, 2BH1, 2EFC, 2F66, 2I2R, 2NPS, |
| | 2OT8, 2P22, 2P4N, 2QMB, 2QNA, 3C3Q, 3CWZ, 3D31, 3D32, |
| | 3EA5, 3FH6 |
| TRANSPORT PROTEIN/CHAPERONE | 2P58 |
| TRANSPORT PROTEIN/LIPOPROTEIN | 2HQS |
| TRANSPORT PROTEIN/OXYGEN | 3BCQ |
| BINDING | |
| TRANSPORT PROTEIN/SIGNALING | 2NUU |
| PROTEIN | |
| OTHER | 3FIE, 3BPS, 1KPS, 1DE4, 1KKL, 1LOT, 1UJW, 3BSZ, 2C0L |

[0069] Another aspect of the present invention relates to methods of screening therapeutic drug candidates to identify candidates that are potentially effective in modulating two-chain inter-protein interactions having a secondary structure at their interface. These methods involve selecting a protein secondary structure from among a collection of protein secondary structures described herein. In one embodiment, a therapeutic drug candidate is contacted with an agent that mimics the protein secondary structure (i.e., secondary structure mimetic). The drug candidate and mimetic agent are contacted under conditions effective for the therapeutic drug candidate to bind to the agent and binding between the therapeutic drug candidate and the agent is detected. Detecting binding between the therapeutic drug candidate and the agent indicates that the therapeutic drug candidate is potentially effective in modulating a two-chain inter-protein interaction having the protein secondary structure at its interface.

[0070] In another embodiment, a therapeutic drug candidate that mimics the protein secondary structure is provided. The therapeutic drug candidate is contacted with at least one protein (or a fragment thereof) involved in a two-chain inter-protein interaction having the protein secondary structure at its interface under conditions effective for the therapeutic drug candidate to bind to the at least one protein (or fragment), and binding between the therapeutic drug candidate and the at least one protein (or fragment) is detected. Detecting binding between the therapeutic drug candidate and the at least one protein (or fragment) indicates that the therapeutic drug candidate is potentially effective in modulating the two-chain inter-protein interaction.

[0071] Protein secondary structure mimics that are suitable for use as a drug candidate or as the target for a drug candidate in the above described methods of screening preferably comprise a molecular scaffold. Various molecular scaffolds of secondary structure are known in the art and can be modified in various ways to mimic the interaction interface residues, especially the hot-spot amino acid residues of the interaction, that have been identified using the methods of the present invention.

[0072] One type of molecular scaffold suitable for mimicking the identified secondary structures are protein surface scaffolds such as miniature protein motif scaffolds, which integrate the desired functionalities of a two-chain inter-protein interaction interface onto a stably folded structural peptide framework (Imperiali et al., “Design Strategies for the Construction of Independently Folded Polypeptide Motifs,” Biopolymers 47:23-29 (1998); Nygren et al., “Binding Proteins from Alternative Scaffolds,” J. Immunol. Methods 290:3-28 (2004), which are hereby incorporated by reference in their entirety). Other suitable protein surface scaffolds include porphyrin and bipyridyl-metal complex scaffolds (Jain et al., “Protein Surface Recognition by Synthetic Recptors Based on Tetraphenylporphyrin Scaffold,” Org. Lett. 2:1721-23 (2000); Takashima et al, “Ru(bpy)(3)-based Artificial Receptors Toward a Protein Surface: Selective Binding and Efficient Photoreduction of Cytochrome C,” Chem. Comm. 2345-46 (1999), which are hereby incorporated by reference in their entirety), calixarene scaffolds (Blaskovich et al., “Design of GFB-111, A Platelet-Derived Growth Factor Binding Molecule with Antiangiogenic and Anticancer Activity Against Human Tumors in Mice,” Nat. Biotechnol. 18:1065-70 (2000), which is hereby incorporated by reference in its entirety), naphthalene and quinoline-based scaffolds (Xu et al., “Evaluation of ‘Credit Card’ Libraries for Inhibition of HIV-1 gp41 Fusogenic Core Formation,” J. Comb. Chem. 8:531-39 (2006), which is hereby incorporated by reference in its entirety), and cyclodextrins (Breslow et al., “Sequence Selective Binding of Peptides by Artificial Receptors in Aqueous Solution,” J. Am. Chem. Soc. 120:3536-37 (1998), which is hereby incorporated by reference in its entirety).

[0073] A preferred class of agents for mimicking helical protein secondary structures include α-helix mimetic scaffolds. Suitable α-helical modular synthetic scaffolds include terphenyl derivatives (FIG. 3; Orner et al., “Toward Proteomimetics: Terphenyl Derivative as Structural and Functional Mimics of Extended Regions of an α-Helix,” J. Am. Chem. Soc. 123:5382-83 (2001), which is hereby incorporated by reference in its entirety), trispyridylamide derivatives (Ernst et al., “Design and Application of an α-Helix-Mimetic Scaffold Based on an Oligoamide-Foldamer Strategy: Antagonism of the Bak BH3/Bc1-xL Complex,” Angew. Chem. Int. Ed. 42:535-39 (2003), which is hereby incorporated by reference in its entirety), terephthalamide derivatives (Yin et al., “Terephthalamide Derivatives as Mimetics of Helical Peptides: Disruption of the Bc1-x(L)/Bak Interaction,” J. Am. Chem. Soc. 127:5463-68 (2005), which is hereby incorporated by reference in its entirety), terpyridine derivatives (Davis et al., “Synthesis of a 2,3′;6′3″-terpyridine Scaffold as an α-Helix Mimetic,” Org. Lett. 7:5405-08 (2005), which is hereby incorporated by reference in its entirety), and bisimidazole derivatives (VanCompernolle et al., “Small Molecule Inhibition of Hepatitis C Virus E2 Binding to CD81,” Virology 314:371-80 (2003), which is hereby incorporated by reference in its entirety). Other α-helical mimetics include β-peptides and peptoids (both shown in FIG. 3), constrained helices, and small molecule mimetics (e.g., 1,4-benzo-diazepine-2,5-diones, 3-hydroxymethylindole, and polycyclic ethers) (reviewed in Herschberger et al., “Scaffolds for Blocking Protein-Protein Interactions,” Curr. Top. Med. Chem. 7:928-42 (2007), which is hereby incorporated by reference in its entirety) and side-chain cross-linked α-helices (FIG. 3). In a preferred embodiment, the α-helical mimetic is a hydrogen-bond surrogate (“HBS”) backbone cross-linked α-helix described in U.S. Pat. No. 7,202,332 to Arora et al., which is hereby incorporated by reference in its entirety.

[0074] β-Strand and β-turn secondary structure mimetic scaffolds are also suitable for mimicking the secondary structures that are at an interface of a two-chain inter-protein interaction. β-strand mimetics, which are typically designed to modulate protein-protease interactions, include the crosslinked β-strand mimetic scaffolds (see e.g., Zutshi et al., “Targeting the Dimerization Interface of HIV-1 Protease: Inhibition with Cross-Linked Interfacial Peptides,” J. Am. Chem. Soc. 119:4841-45 (1997), which is hereby incorporated by reference in its entirety) and peptidomimetic β-strand mimetic scaffolds. The peptidomimetic β-strand mimetics may contain various ring systems, including six-membered piperidine rings, pyridine rings, and pyrrolinone rings; cyclic urea complexes; or azacyclohexenone units incorporated into the peptide backbones (reviewed in Herschberger et al., “Scaffolds for Blocking Protein-protein Interactions,” Curr. Top. Med. Chem. 7:928-42 (2007), which is hereby incorporated by reference in its entirety). Suitable β-turn mimetic scaffolds include β-D-glucose scaffolds (Hirschmann et al., “Nonpeptidal Peptidomimetics with a Beta-Glucose Scaffolding—A Partial Somatostatin Agonist Bearing a Close Structural Relationship to a Potent, Selective Substance-P Antagonist,” J. Am. Chem. Soc. 114:9217-18 (1992), which is hereby incorporated by reference in its entirety), constrained structural mimetics to mimic type I β-turns (Etzkorn et al., “Cyclic Hexapeptides and Chimeric Peptides as Mimics of Tendamistat,” J. Am. Chem. Soc. 116:10412-25 (1994), which is hereby incorporated by reference in its entirety), and conformationally constrained cyclic scaffolds (Virgilio et al., “Simultaneous Solid-Phase Synthesis of Beta-Turn Mimetics Incorporating Side Chain Functionality,” J. Am. Chem. Soc. 116:11580-81 (1994); Maliartchouk et al., “A Designed Peptidomimetic Agonistic Ligand of TrkA Nerve Growth Factor Receptors,” Mol. Pharmacol. 57:385-91 (2000); Ulysse et al., “A Light Activated β-Turn Scaffold Within a Somatostatin Analog: NMR Structure and Biological Activity,” Chem. Biol. Drug Des. 67:127-36 (2006), which are hereby incorporated by reference in their entirety). The non-peptidic oligomers described in U.S. Patent Publication No. 20070105917 to Arora et al., which is hereby incorporated by reference in its entirety, are also suitable secondary structure mimetics that can be used in accordance with this aspect of the present invention.

[0075] Suitable screening assays for identifying potentially therapeutic drug candidates can be in silico, in vitro, or ex vivo based assays.

[0076] In silico or virtual screening assays are particularly useful for evaluating the binding between a secondary structure mimetic and a drug candidate for the identification of a protein binding pocket. A number of web-based programs and databases, such as Molsoft, exist to facilitate in silico screening and are suitable for use in accordance with this aspect of the invention. Villoutreix et al., “Free Resources to Assist Structure-Based Virtual Ligand Screening Experiments,” Curr. Protein Pept. Sci 8(4):381-411 (2007), which is hereby incorporated by reference in its entirety, provides over 350 URLs to various free web-based applications and services for in silico screening.

[0077] In another embodiment of the present invention, the screening assay is an in vitro screening assay designed to detect a binding interaction between two potential binding partners. A number of in vitro screening assay formats are commercially available, for example AlphaScreen™ from Perkin Elmer®, that are particularly suitable for carrying out this aspect of the present invention. AlphaScreen is a bead-based chemistry, where members of the binding interaction (e.g., the secondary structure mimetic agent and therapeutic drug candidate, or the secondary structure mimetic drug candidate and protein involved in the two-chain inter-protein interaction) are bound to donor and acceptor beads, respectively. Binding between the members of the potential interaction brings the donor and acceptor beads in close proximity, facilitating energy transfer and light production that is detected at defined excitation/emission spectra.

[0078] An alternative in vitro screening assay format is a solid-phase assay, where one member of the potential binding interaction (e.g., the secondary structure mimetic agent) is attached to a solid support and the other member of the binding interaction (e.g., the drug candidate) contains a detectable label. Suitable detectable labels include fluorescent molecules, enzymes, prosthetic groups, luminescent materials, bioluminescent materials, radioactive materials, positron emitting metals using various positron emission tomographies, and nonradioactive paramagnetic metal ions.

[0079] Surface plasmon resonance (SPR)-based biomolecular interaction analysis is an alternative in vitro screening strategy suitable for detection of a binding interaction between a therapeutic drug candidate and a secondary structure mimetic agent (or between a secondary structure mimetic therapeutic drug candidate and a protein involved in a two-chain inter-protein interaction). In this assay format, one member of the binding interaction is immobilized on a biosensor chip. A microfluidic system injects an analyte solution containing the other interacting molecule over the sensor surface. Binding of the two members is qualitatively assessed in real-time using SPR-biosensors that visualize and measure the binding interaction based on the change in mass concentration that occurs on the sensor chip surface during the binding and dissociation process.

[0080] In another embodiment of the present invention, the screening assay is an ex vivo screening assay designed to detect (or, more preferably, validate) a binding interaction between the two members of the potential interaction. For example, an ex vivo assay where live cells expressing both proteins of a two-chain inter-protein interaction having the secondary structure at their interface are contacted with the therapeutic drug candidate (e.g., a secondary structure mimetic). The ability of the drug candidate to modulate the two-chain inter-protein interaction is detected by assaying a downstream biological function of the two-chain inter-protein interaction.

[0081] Suitable endpoints to measure will depend on the protein interaction being examined, but may include, for example, gene transcription, kinase activity, DNA binding, enzyme activity, or other cell signaling activities.

[0082] In another embodiment of the present invention, the screening assay is an in vivo screening assay designed to detect, or more preferably, validate a binding interaction between the two members of the potential two-chain inter-protein interaction. For example, an in vivo assay may involve treating an animal that expresses both proteins of a two-chain inter-protein interaction having a secondary structure at their interface with a therapeutic drug candidate (e.g. a secondary structure mimetic). The ability of the drug candidate to modulate the two-chain inter-protein interaction is detected by assaying a downstream biological function of the two-chain inter-protein interaction in the animal. Suitable endpoints to measure will depend on the protein interaction being examined, but may include, for example, gene transcription, kinase activity, DNA binding, enzyme activity, or other cell signaling activities.

### EXAMPLES

### Example 1

### Identification of Helical Interfaces in Protein-Protein Interactions

[0083] The methodology utilized to identify helical interfaces in protein-protein interactions is outlined in FIG. 4. Protein structures containing more than one protein entity were obtained from the Protein Data Bank (PDB) using the advanced search function available on the website and stored in a parent PDB file. A Perl script to construct individual PDB files for each interacting protein chain within the parent PDB file was developed. This script reads a PDB file, identifies atoms from different chains that interaction with each other, then creates a new formatted PDB file with those two chains. This process is repeated until all interacting chains have a new PDB file. If the parent PDB file contains more than one structure, only the first structure is considered.

[0084] A second Perl script to identify protein partner chains between separate entities was developed. This script reads a PDB file, identifies chains that belong to separate entities within the PDB file, and creates a list of the PDB code and partnering chains that are part of the separate entities. This enables the identification of those helix interfaces that are between separate protein entities, i.e., inter-protein interactions, as opposed to helical interfaces between chains in a single protein, i.e., intra-protein interactions.

[0085] Having identified the inter-protein interactions, modifications to Rosetta© computational tools, written in C++ programming language, were utilized to identify helical interfaces between interacting protein chains. Rosetta© contains separate programs that identify interface residues and assigns secondary structure to a protein backbone. The computer program code developed here links these two routines to find protein chains with interface residues that lie within a helix. A helical segment was defined as one that contains at least four contiguous residues with φ and φ angles that are characteristic of the α-helix (φ=−57°±50°, φ=−47°±50°). Often, protein-protein interfaces are defined according to geometrically continuous patches of residues on the surface of a protein that exclude solvent by binding to another chain. This definition might include some residues that are not really involved in the interaction or exclude some residues that play a key role in the interaction. Therefore, a distance threshold between residues of different chains was used.

[0086] An interface residue is defined as (i) a residue that has at least one atom within a 5 Å radius of an atom belonging to a binding partner in the protein complex, or (ii) a residue that becomes significantly buried upon complex formation, as measured by the density of C_{β} atoms within a sphere with a radius of 5 Å around the C_{β} atom of the residue of interest.

[0087] The length of each helix involved in helical interface protein-protein interactions was calculated using a C++ program.

[0088] The PDB structures involved in helical interface protein-protein interactions were classified according to molecular function. The categories were derived from those listed in the ‘Advanced Search’ option on the PDB website.

[0089] The PDB contains more than 55,000 structures (Berman et al., “The Protein Data Bank,” Nucleic Acids Res. 28:235-242 (2000), which is hereby incorporated by reference in its entirety). Approximately 80% of these structures contain a single protein entity and 4% contain no protein entities. The remaining 16%, or about 8,678 structures, contain more than two separate protein entities and form the dataset for evaluation of helical interfaces in protein-protein interactions (“HIPP interactions”) (FIG. 5A). A computer analysis of this dataset revealed that 13% contained HIPP interactions. These complexes may also contain other secondary motifs, but the current study focuses solely on the helical portions.

[0090] In an initial analysis, a dataset of 7,066 HIPP interactions were identified. This dataset is disclosed in U.S. Provisional Patent Application Ser. No. 61/166,211 and Jochim et al., “Assessment of Helical Interfaces in Protein-Protein Interactions,” Mol. Biosyst. 5(9):924-6 (2009), which are hereby incorporated by reference in their entirety. The identified 7,066 HIPP complexes contain considerable redundancy in sequence and structure owing to the redundancy in the PDB. Structures with greater than 95% sequence similarity were removed with the CD-HIT algorithm (Li et al., “Clustering of Highly Homologous Sequences to Reduce the Size of Large Protein Databases,” Bioinformatics 17:282-283 (2001), which is hereby incorporated by reference in its entirety) to obtain a better understanding of the types of complexes involved in HIPP interactions. This screen provided a non-redundant dataset of 1,658 HIPP interactions for analysis, which is disclosed in U.S. Provisional Patent Application Ser. No. 61/166,211 and Jochim et al., “Assessment of Helical Interfaces in Protein-Protein Interactions,” Mol. Biosyst. 5(9):924-6 (2009), which are hereby incorporated by reference in their entirety.

[0091] The CD-HIT algorithm used to remove the redundant interactions searches the sequence information of each chain of an interaction from the PDB FASTA file. Using this algorithm, however, redundant two-chain and single chain interactions were removed. Therefore, to ensure that only redundant two-chain interactions were removed (rather than redundant single chains), the chain identifier was removed from the FASTA file of the PDB entries in the dataset of 7,066 interactions and then the CD-HIT algorithm search was reexecuted, so that the entire amino acid sequence of the protein-protein complex is searched rather than just the individual protein chains. Using this approach, a non-redundant dataset of 2,561 HIPP interactions for analysis was identified, which is shown in Table 2 above. The helical two-chain inter-protein interactions of the non-redundant dataset are identified by their PDB code and function of the protein complex. In addition, the partner chains, helix size, number of hot-spot residues, and helix amino acid sequence are also identified. The helical inter-protein interactions are ranked by ΔΔG_{SUM} (Kcal/mol), which represents the sum of binding free energy for all hot spot residues in each helix. The ΔΔG_{AVE} (Kcal/mol), representing the sum of binding free energy for all hot spot residues in each helix divided by the number of hot spot residues in that helix, is also provided for each helical inter-protein interaction. The binding free energy values can be used to identify inter-protein interactions that can be easily targeted by helix mimetics or small molecule inhibitors. For example, inter-protein interactions having energy values of 3.0 kcal/mol and higher can be targeted by either helix mimetics or small molecule inhibitors. Inter-protein interactions having energy values in the range of 1.5-2.0 kcal/mol are more difficult to target with small molecules; however, these interactions can be targeted by helix mimetics.

[0092] The hot-spot residues of the helical two-chain inter-protein interactions of Table 2 were also identified and are show in Table 17 below. Hot spot residues within each interaction are identified by the PDB code of the protein complex, partner chain, residue number, and amino acid residue. The ΔΔG (Kcal/mol) for each hot spot residue is also provided. There were 43,397 hot-spot residues identified in the 2,561 HIPP interactions.

Lengthy table referenced here
US20100281003A1-20101104-T00002
Please refer to the end of the specification for access instructions.

[0093] As noted supra, HIPP interactions can be categorized according to their identified function as defined in the PDB (FIG. 5B). Some HIPP interactions could fall into more than one function category. A subset of HIPP interactions were categorized by function and each HIPP interaction was limited to one category (see Tables 3-16). Helical interfaces are involved in a wide distribution of functions ranging from enzymatic activity to protein associations. The largest category, energy metabolism and various enzymes, accounts for 34% of HIPP interactions. This category contains many hydrolases, oxidoreductases, and transferases, among other enzymes (Table 5). The protein synthesis and turnover category contains chaperones, proteosomes, ribosomes, and other proteins involved in protein synthesis (Table 10). The transcription category contains proteins that are either part of transcription regulation, such as activators or repressors, or are part of the transcription machinery, such as those that bind to DNA (Table 15). The DNA binding category contains proteins that target DNA but are not involved in transcription (Table 4).

[0094] The length of each helix participating in the interface of the identified complexes was also examined (see Table 2). Helix length was calculated as the total length of polypeptide chain that contained any interface residues. Thus, the full length of the helix, including residues that may not be part of the interface, were included. This analysis indicates that helices involved in protein interactions range from five residues to 113 residues. The number of helix residues directly engaged in binding has been assessed previously by examining 122 homodimers and 204 protein-protein heterocomplexes (Guharoy et al., “Secondary Structure Based Analysis and Classification of Biological Interfaces: Identification of Binding Motifs in Protein-Protein Interactions,” Bioinformatics 23:1909-1918 (2007), which is hereby incorporated by reference in its entirety). This study implicated an average helix length of seven residues in binding (Guharoy et al., “Secondary Structure Based Analysis and Classification of Biological Interfaces: Identification of Binding Motifs in Protein-Protein Interactions,” Bioinformatics 23:1909-1918 (2007), which is hereby incorporated by reference in its entirety). Together, these studies emphasize the short length of the helical domain involved in protein interactions.

[0095] This study reveals new classes of previously unidentified targets for helix mimetics. Some of the identified targets will potentially aid in drug discovery efforts. In this regard, it is interesting to note that this query identified a number of kinases that may be regulated by helix mimetics (see Table 6 above). In this collection, the secondary structures are helical structures. The specific amino acid interface residues comprising the helical structures at the interface of the two-chain inter-protein interactions are shown in Table 6.

[0096] Kinases are an important class of potential drug targets. Typical kinase inhibitors mimic ATP or substrate conformations. New types of scaffolds that can specifically regulate the function of therapeutically important kinases will fill an important gap in a medicinal chemist's repertoire (Fedorov et al., “Insights for the Development of Specific Kinase Inhibitors by Targeted Structural Genomics,” Drug Discov. Today 12:365-372 (2007), which is hereby incorporated by reference in its entirety). These scaffolds can be generated using the data provided in Tables 2, 6, and 17.

[0097] In summary, a collection of helical interfaces in protein-protein interactions have been identified and analyzed using various computer executable codes and scripts. This study was undertaken to address the significant chasm in the elegant design of helix mimetics and their sporadic use in biology. This study provides an extensive list of potential targets for the emerging classes of helix mimetics.

[0098] Although preferred embodiments have been depicted and described in detail herein, it will be apparent to those skilled in the relevant art that various modifications, additions, substitutions, and the like can be made without departing from the spirit of the invention and these are therefore considered to be within the scope of the invention as defined in the claims which follow.

LENGTHY TABLES
The patent application contains a lengthy table section. A copy of the table is available in electronic form from the USPTO web site (http://seqdata.uspto.gov/?pageRequest=docDetail&DocID=US20100281003A1). An electronic copy of the table will also be available from the USPTO upon request and payment of the fee set forth in 37 CFR 1.19(b)(3).

What is claimed:

1. A method of generating a database of protein secondary structures that are at an interface of a two-chain inter-protein interaction said method comprising:
retrieving, from a protein database, multi-entity protein structures having one or more inter-chain interactions;
extracting, from the retrieved multi-entity protein structures, two-chain protein structures;
distinguishing the extracted two-chain protein structures having inter-protein interactions from the extracted two-chain protein structures having only intra-protein interactions;
identifying the distinguished two-chain inter-protein interactions that comprise a protein secondary structure at their interface; and
storing in a memory storage device the protein secondary structures at an interface of the identified two-chain inter-protein interactions.

2. The method according to claim 1, further comprising:
classifying the identified two-chain inter-protein interactions by biological function.

3. The method according to claim 1, further comprising:
removing, prior to storing, any redundant two-chain inter-protein interactions from the identified two-chain inter-protein interactions that comprise a protein secondary structure at their interface.

4. The method according to claim 1, further comprising:
querying the protein data base at various time intervals to identify one or more additional multi-entity protein structures;
repeating the retrieving, extracting, distinguishing, and identifying steps;
identifying any non-redundant secondary structures at an interface of a two-chain inter-protein interaction; and
storing the identified non-redundant secondary structures in the memory storage device.

5. The method according to claim 1, wherein the protein secondary structure comprises a helical structure.

6. The method according to claim 1, wherein the protein secondary structures comprise a β-strand structure.

7. The method according to claim 1, wherein the protein secondary structures comprise a β-turn structure.

8. The method according to claim 1, wherein said identifying comprises:
measuring φ and φ angles of at least four contiguous amino acid residues of each chain of the two-chain inter-protein interactions; and
identifying secondary structures present at an interface of the two-chain inter-protein interactions based on said measuring.

9. The method according to claim 1, wherein said identifying comprises:
identifying interface amino acid residues of at least one of the identified two-chain inter-protein interactions.

10. The method according to claim 9, wherein said identifying interface amino acid residues comprises:
identifying an amino acid residue in one chain of an identified two-chain inter-protein interaction having at least one atom within a 5 Å radius of an atom in the other chain of the identified two-chain inter-protein interaction.

11. The method according to claim 9, wherein said identifying interface amino acid residues comprises:
measuring density of C_{β} atoms surrounding a C_{β} atom of an amino acid residue in one chain of an identified two-chain inter-protein interaction; and
identifying interface amino acid residues based on said measuring.

12. The method according to claim 9 further comprising:
determining which of the identified interface amino acid residues are hot spot amino acid residues.

13. The method according to claim 12, wherein said determining is carried out using an amino acid mutagenesis analysis.

14. A computer readable medium having stored thereon instructions that when executed by a processor generate a database of protein secondary structures that are at an interface of a two-chain inter-protein interaction, the computer readable medium having residing thereon machine executable code that when executed by at least one processor, causes the processor to perform steps comprising:
retrieving, from a protein database, multi-entity protein structures having one or more inter-chain interactions;
extracting, from the retrieved multi-entity protein structures, two-chain protein structures;
distinguishing the extracted two-chain protein structures having inter-protein interactions from the extracted two-chain protein structures having only intra-protein interactions;
identifying the distinguished two-chain inter-protein interactions that comprise a protein secondary structure at their interface; and
storing in a memory storage device the protein secondary structures at an interface of the identified two-chain inter-protein interactions.

15. The medium according to claim 14, wherein the machine executable code further contains instructions for:
classifying the identified two-chain inter-protein interactions by biological function.

16. The medium according to claim 14, wherein the machine executable code further contains instructions for:
removing, prior to storing, any redundant two-chain inter-protein interactions from the identified two-chain inter-protein interactions that comprise a protein secondary structure at their interface.

17. The medium according to claim 14, wherein the machine executable code further contains instructions for:
querying the protein data base at various time intervals to identify one or more additional multi-entity protein structures;
repeating the retrieving, extracting, distinguishing, and identifying steps;
identifying any non-redundant secondary structures at an interface of a two-chain inter-protein interactions; and
storing the identified non-redundant secondary structures in the memory storage device.

18. The medium according to claim 14, wherein the protein secondary structure comprises a helical structure.

19. The medium according to claim 14, wherein the protein secondary structures comprise a β-strand structure.

20. The medium according to claim 14, wherein the protein secondary structures comprise a β-turn structure.

21. The medium according to claim 14, wherein said identifying comprises:
measuring φ and φ angles of at least four contiguous amino acid residues of each chain of the two-chain inter-protein interactions; and
identifying secondary structures present at an interface of the two-chain inter-protein interactions based on said measuring.

22. The medium according to claim 14, wherein said identifying comprises:
identifying interface amino acid residues of at least one of the identified two-chain inter-protein interactions.

23. The medium according to claim 22, wherein said identifying interface amino acid residues comprises:
identifying an amino acid residue in one chain of an identified two-chain inter-protein interaction having at least one atom within a 5 Å radius of an atom in the other chain of the identified two-chain inter-protein interaction.

24. The medium according to claim 22, wherein said identifying interface amino acid residues comprises:
measuring density of C_{β} atoms surrounding a C_{β} atom of an amino acid residue in one chain of an identified two-chain inter-protein interaction; and
identifying interface amino acid residues based on said measuring.

25. The medium according to claim 22 further comprising:
determining which of the identified interface amino acid residues are hot spot amino acid residues.

26. The medium according to claim 25, wherein said determining is carried out using an amino acid mutagenesis analysis.

27. A system for generating a database of protein secondary structures that are at an interface of a two-chain inter-protein interaction, the system comprising:
a retrieval module that retrieves, from a protein database stored on a memory storage device, multi-entity protein structures having one or more inter-chain interactions;
an extraction module that extracts, from the retrieved multi-entity protein structures, two-chain protein structures;
a distinguishing module that distinguishes the extracted two-chain protein structures having inter-protein interactions from the extracted two-chain protein structures having only intra-protein interactions;
an identification module that identifies the distinguished two-chain inter-protein interactions that comprise a protein secondary structure at their interface; and
a storage module for storing to a memory storage device the protein secondary structures at an interface of the identified two-chain inter-protein interactions.

28. The system according to claim 27, further comprising:
a classification module that classifies the identified two-chain inter-protein interactions by biological function.

29. The system according to claim 27, further comprising:
a removal module that removes, prior to storing, any redundant two-chain inter-protein interactions from the identified two-chain inter-protein interactions that comprise a protein secondary structure at their interface.

30. The system according to claim 27, wherein the secondary structures comprise a helical structure.

31. The system according to claim 27, wherein the secondary structures comprise a β-strand structure.

32. The system according to claim 27, wherein the secondary structures comprise a β-turn.

33. The system according to claim 27, wherein the identification module is configured to measure φ and φ angles of at least four contiguous amino acid residues of each chain of the two-chain inter-protein interactions and identify secondary structures present at an interface of the two-chain inter-protein interactions based on the measured angles.

34. The system according to claim 27, wherein the identification module is configured to identify interface amino acid residues of at least one of the identified two-chain inter-protein interactions.

35. The system according to claim 34, wherein the identification system is configured to identify an amino acid residue in one chain of an identified two-chain inter-protein interaction having at least one atom within a 5 Å radius of an atom in the other chain of the identified two-chain inter-protein interaction.

36. The system according to claim 34, wherein the identification system is configured to measure density of C_{β} atoms surrounding a C_{β} atom of an amino acid residue in one chain of an identified two-chain inter-protein interaction and identify interface amino acid residues based on the measured density.

37. The system according to claim 34 further comprising:
a module for determining which of the identified interface amino acid residues are hot spot amino acid residues.

38. The system according to claim 37, wherein the system for determining which of the identified interface amino acid residues are hot spot amino acid residues is configured to carry out an amino acid mutagenesis analysis.

39. The system according to claim 27, further comprising:
a query module that queries the protein data base at various time intervals to identify one or more additional multi-entity protein structures, and
a comparison module that compares the identified secondary structures at an interface of a two-chain inter-protein interaction to identify non-redundant secondary structures.

40. A collection of isolated protein secondary structures that are at an interface of a two-chain inter-protein interaction, wherein the collection contains about 1%, about 5%, about 10%, about 20%, about 40%, about 60%, about 80%, or about 100% of the isolated protein secondary structures of Table 2.

41. The collection according to claim 40, wherein the collection contains m through n secondary structures, where m and n are integers and n is greater than m.

42. The collection according to claim 41, wherein m is an integer selected from the group consisting of 2, 4, 8, 10, 50, 100, 200, 300, 400, 500, 600, 700, 800, 900, 1000, 1500, 2000, 2500, 3000, 3500, 4000, 4500, and 5000; and n is an integer selected from the group consisting of 10, 15, 50, 100, 200, 300, 400, 500, 600, 700, 800, 900, 1000, 1500, 2000, 2500, 3000, 3500, 4000, 4500, 5000, 5500, 6000, 6500, 7000, 7500, 8000, 8500, 9000, and 10000.

43. The collection according to claim 40, wherein the collection is a collection of helical protein secondary structures.

44. The collection according to claim 40, wherein the collection is a collection of protein secondary structures potentially involved in modulating cell cycle.

45. The collection according to claim 40, wherein the collection is a collection of protein secondary structures potentially involved in modulating DNA binding.

46. The collection according to claim 40, wherein the collection is a collection of protein secondary structures potentially involved in modulating energy metabolism and/or enzymatic activity.

47. The collection according to claim 40, wherein the collection is a collection of protein secondary structures potentially involved in modulating immune system function.

48. The collection according to claim 40, wherein the collection is a collection of protein secondary structures potentially involved in modulating cell membrane proteins and/or receptor interactions.

49. The collection according to claim 40, wherein the collection is a collection of helical protein secondary structures potentially involved in modulating protein binding or have an unknown function.

50. The collection according to claim 40, wherein the collection is a collection of protein secondary structures potentially involved in modulating protein synthesis and/or turnover.

51. The collection according to claim 40, wherein the collection is a collection of protein secondary structures potentially involved in modulating RNA binding.

52. The collection according to claim 40, wherein the collection is a collection of protein secondary structures potentially involved in modulating cell signaling.

53. The collection according to claim 40, wherein the collection is a collection of protein secondary structures potentially involved in modulating cellular structure and/or cellular adhesion.

54. The collection according to claim 40, wherein the collection is a collection of protein secondary structures potentially involved in modulating gene transcription.

55. The collection according to claim 40, wherein the collection is a collection of protein secondary structures potentially involved in modulating cellular transport.

56. The collection according to claim 40, wherein the collection is a collection of protein secondary structures that are from toxins, viruses, or bacteria.

57. A method of identifying a therapeutic drug candidate potentially effective in modulating a two-chain inter-protein interaction having a secondary structure at its interface, said method comprising:
providing a therapeutic drug candidate;
selecting a protein secondary structure from the collection according to claim 40;
providing an agent, wherein the agent mimics the protein secondary structure;
contacting the therapeutic drug candidate with the agent under conditions effective for the therapeutic drug candidate to bind to the agent; and
detecting whether any binding occurs between the therapeutic drug candidate and the agent, wherein binding between the therapeutic drug candidate and the agent indicates that the therapeutic drug candidate is potentially effective in modulating a two-chain inter-protein interaction having the protein secondary structure at its interface.

58. A method of identifying a therapeutic drug candidate potentially effective in modulating a two-chain inter-protein interaction having a secondary structure at its interface, said method comprising:
selecting a protein secondary structure from the collection according to claim 40;
providing a therapeutic drug candidate, wherein the drug candidate mimics the protein secondary structure;
providing at least one protein of a two-chain inter-protein interaction having the protein secondary structure at its interface;
contacting the therapeutic drug candidate with the at least one protein under conditions effective for the therapeutic drug candidate to bind to the at least one protein; and
detecting whether any binding occurs between the therapeutic drug candidate and the at least one protein, wherein binding between the therapeutic drug candidate and the at least one protein indicates that the therapeutic drug candidate is potentially effective in modulating the two-chain inter-protein interaction.

59. The method according to claim 57, wherein said contacting is carried out in vitro.

60. The method according to claim 57, wherein said contacting is carried out ex vivo.

61. The method according to claim 57, wherein said contacting is carried out in vivo.

The application's sequence listing, which the Patent Office published only in electronic form, follows.

SEQUENCE LISTING (22240 sequences)

SEQ ID NO: 1 - protein, 12 aa, Artificial
  helical interface sequence
SVWIGGSILASL

SEQ ID NO: 2 - protein, 5 aa, Artificial
  helical interface sequence
VIEQS

SEQ ID NO: 3 - protein, 5 aa, Artificial
  helical interface sequence
VIEQS

SEQ ID NO: 4 - protein, 5 aa, Artificial
  helical interface sequence
VIEQS

SEQ ID NO: 5 - protein, 5 aa, Artificial
  helical interface sequence
VIEQS

SEQ ID NO: 6 - protein, 5 aa, Artificial
  helical interface sequence
VIEQS

SEQ ID NO: 7 - protein, 5 aa, Artificial
  helical interface sequence
VIEQS

SEQ ID NO: 8 - protein, 12 aa, Artificial
  helical interface sequence
SVWIGGSILASL

SEQ ID NO: 9 - protein, 5 aa, Artificial
  helical interface sequence
DKLRQ

SEQ ID NO: 10 - protein, 5 aa, Artificial
  helical interface sequence
DKLRQ

SEQ ID NO: 11 - protein, 5 aa, Artificial
  helical interface sequence
DKLRQ

SEQ ID NO: 12 - protein, 6 aa, Artificial
  helical interface sequence
IFSILE

SEQ ID NO: 13 - protein, 6 aa, Artificial
  helical interface sequence
IFSILE

SEQ ID NO: 14 - protein, 20 aa, Artificial
  helical interface sequence
RQKFIFTLLMFVIYRLGSHI

SEQ ID NO: 15 - protein, 8 aa, Artificial
  helical interface sequence
WLPFARAA

SEQ ID NO: 16 - protein, 12 aa, Artificial
  helical interface sequence
PQNFRLLGNVLA

SEQ ID NO: 17 - protein, 12 aa, Artificial
  helical interface sequence
LGGALLCAIHGA

SEQ ID NO: 18 - protein, 9 aa, Artificial
  helical interface sequence
CVAYSAPLA

SEQ ID NO: 19 - protein, 9 aa, Artificial
  helical interface sequence
CVAYSAPLA

SEQ ID NO: 20 - protein, 14 aa, Artificial
  helical interface sequence
TDGAHIQTLLLTFF

SEQ ID NO: 21 - protein, 11 aa, Artificial
  helical interface sequence
YEELVRMVLSG

SEQ ID NO: 22 - protein, 9 aa, Artificial
  helical interface sequence
TMFLSIFSD

SEQ ID NO: 23 - protein, 47 aa, Artificial
  helical interface sequence
VSRAVESSQKRVEGNNFDSRKQLLQYDDVLRQQREVIYKQRFEVIDS

SEQ ID NO: 24 - protein, 15 aa, Artificial
  helical interface sequence
PAYGAQALQRMFLSF

SEQ ID NO: 25 - protein, 8 aa, Artificial
  helical interface sequence
HSLLVTLA

SEQ ID NO: 26 - protein, 43 aa, Artificial
  helical interface sequence
AEIITATQARCRGFLMRVEYRAMVERRESIFCIQYNVRSFMNV

SEQ ID NO: 27 - protein, 12 aa, Artificial
  helical interface sequence
FILREKITHFDH

SEQ ID NO: 28 - protein, 12 aa, Artificial
  helical interface sequence
AHLMAEFADALF

SEQ ID NO: 29 - protein, 15 aa, Artificial
  helical interface sequence
LALLFATYGGEAEGG

SEQ ID NO: 30 - protein, 9 aa, Artificial
  helical interface sequence
SALFRENLN

SEQ ID NO: 31 - protein, 9 aa, Artificial
  helical interface sequence
SALFRENLN

SEQ ID NO: 32 - protein, 16 aa, Artificial
  helical interface sequence
WRVVGVWFAALGISTM

SEQ ID NO: 33 - protein, 16 aa, Artificial
  helical interface sequence
GGALFCAMHGSLVTSS

SEQ ID NO: 34 - protein, 17 aa, Artificial
  helical interface sequence
GRRKAMAKSIAECGQDA

SEQ ID NO: 35 - protein, 9 aa, Artificial
  helical interface sequence
IRKWLVLRN

SEQ ID NO: 36 - protein, 5 aa, Artificial
  helical interface sequence
YDEHL

SEQ ID NO: 37 - protein, 5 aa, Artificial
  helical interface sequence
YDEHL

SEQ ID NO: 38 - protein, 12 aa, Artificial
  helical interface sequence
SVWIGGSILASL

SEQ ID NO: 39 - protein, 12 aa, Artificial
  helical interface sequence
SVWIGGSILASL

SEQ ID NO: 40 - protein, 12 aa, Artificial
  helical interface sequence
SVWIGGSILASL

SEQ ID NO: 41 - protein, 12 aa, Artificial
  helical interface sequence
SVWIGGSILASL

SEQ ID NO: 42 - protein, 5 aa, Artificial
  helical interface sequence
YDEHL

SEQ ID NO: 43 - protein, 5 aa, Artificial
  helical interface sequence
YDEHL

SEQ ID NO: 44 - protein, 5 aa, Artificial
  helical interface sequence
YDEHL

SEQ ID NO: 45 - protein, 23 aa, Artificial
  helical interface sequence
VADARVLVDFARISAQQEKVTYG

SEQ ID NO: 46 - protein, 9 aa, Artificial
  helical interface sequence
DRLRPLSYP

SEQ ID NO: 47 - protein, 16 aa, Artificial
  helical interface sequence
DAVQRAKEVLEEISCY

SEQ ID NO: 48 - protein, 12 aa, Artificial
  helical interface sequence
VSDLKEAVDKLG

SEQ ID NO: 49 - protein, 11 aa, Artificial
  helical interface sequence
KDDLRETFAAM

SEQ ID NO: 50 - protein, 11 aa, Artificial
  helical interface sequence
WADIINRANLG

SEQ ID NO: 51 - protein, 11 aa, Artificial
  helical interface sequence
WADIINRANLG

SEQ ID NO: 52 - protein, 9 aa, Artificial
  helical interface sequence
DRLRPLSYP

SEQ ID NO: 53 - protein, 27 aa, Artificial
  helical interface sequence
TLEEEVELARKVEEGMEAIKKLSEITG

SEQ ID NO: 54 - protein, 11 aa, Artificial
  helical interface sequence
DEFIAHRLGLI

SEQ ID NO: 55 - protein, 12 aa, Artificial
  helical interface sequence
KETWETWWTEYW

SEQ ID NO: 56 - protein, 15 aa, Artificial
  helical interface sequence
ETEIEDFKEAFTVID

SEQ ID NO: 57 - protein, 26 aa, Artificial
  helical interface sequence
YLMFIMILVAFSVILSVVVLNLHHRS

SEQ ID NO: 58 - protein, 39 aa, Artificial
  helical interface sequence
VLGMLEDMRDERLSKIISMFQAHIRGYLMRKAYKKLQDQ

SEQ ID NO: 59 - protein, 6 aa, Artificial
  helical interface sequence
RFRQNL

SEQ ID NO: 60 - protein, 7 aa, Artificial
  helical interface sequence
ALDVANK

SEQ ID NO: 61 - protein, 15 aa, Artificial
  helical interface sequence
ETEIEDFKEAFTVID

SEQ ID NO: 62 - protein, 10 aa, Artificial
  helical interface sequence
RMWIFLEKLL

SEQ ID NO: 63 - protein, 27 aa, Artificial
  helical interface sequence
TLEEEVELARKVEEGMEAIKKLSEITG

SEQ ID NO: 64 - protein, 43 aa, Artificial; identical to SEQ ID NO: 26
  helical interface sequence

SEQ ID NO: 65 - protein, 19 aa, Artificial
  helical interface sequence
ERRESIFCIQYNVRSFMNV

SEQ ID NO: 66 - protein, 5 aa, Artificial
  helical interface sequence
TKNLL

SEQ ID NO: 67 - protein, 18 aa, Artificial
  helical interface sequence
PLLQGRLFSYTDTQISRL

SEQ ID NO: 68 - protein, 6 aa, Artificial
  helical interface sequence
FEKTME

SEQ ID NO: 69 - protein, 14 aa, Artificial
  helical interface sequence
TDGAHIQTLLLTFF

SEQ ID NO: 70 - protein, 18 aa, Artificial
  helical interface sequence
PFLATKINEAKDFLEKRG

SEQ ID NO: 71 - protein, 11 aa, Artificial
  helical interface sequence
VEEFWAIIQNI

SEQ ID NO: 72 - protein, 14 aa, Artificial
  helical interface sequence
AACANRIEKRLNKI

SEQ ID NO: 73 - protein, 11 aa, Artificial
  helical interface sequence
KDDLRETFAAM

SEQ ID NO: 74 - protein, 8 aa, Artificial
  helical interface sequence
IKKLVGLQ

SEQ ID NO: 75 - protein, 14 aa, Artificial
  helical interface sequence
EFTEAESNMNDLVS

SEQ ID NO: 76 - protein, 27 aa, Artificial
  helical interface sequence
YFVVNVIIPCLLFSFLTGLVFYLPTDS

SEQ ID NO: 77 - protein, 6 aa, Artificial
  helical interface sequence
PHLLWE

SEQ ID NO: 78 - protein, 11 aa, Artificial
  helical interface sequence
GAEIRHVLVTL

SEQ ID NO: 79 - protein, 43 aa, Artificial; identical to SEQ ID NO: 26
  helical interface sequence

SEQ ID NO: 80 - protein, 6 aa, Artificial
  helical interface sequence
HQDWLN

SEQ ID NO: 81 - protein, 5 aa, Artificial
  helical interface sequence
IMGER

SEQ ID NO: 82 - protein, 7 aa, Artificial
  helical interface sequence
ELGRPDA

SEQ ID NO: 83 - protein, 33 aa, Artificial
  helical interface sequence
PRSWLATSHFVLAFFFLVGHLWHAGRARAAAAG

SEQ ID NO: 84 - protein, 11 aa, Artificial
  helical interface sequence
KDDLRETFAAM

SEQ ID NO: 85 - protein, 16 aa, Artificial
  helical interface sequence
YEAVGGATLARCLIVY

SEQ ID NO: 86 - protein, 8 aa, Artificial
  helical interface sequence
LDESCKIL

SEQ ID NO: 87 - protein, 43 aa, Artificial; identical to SEQ ID NO: 26
  helical interface sequence

SEQ ID NO: 88 - protein, 5 aa, Artificial
  helical interface sequence
PRLSH

SEQ ID NO: 89 - protein, 43 aa, Artificial; identical to SEQ ID NO: 26
  helical interface sequence

SEQ ID NO: 90 - protein, 7 aa, Artificial
  helical interface sequence
LREQFNL

SEQ ID NO: 91 - protein, 11 aa, Artificial
  helical interface sequence
LEEVEHVKEAV

SEQ ID NO: 92 - protein, 9 aa, Artificial
  helical interface sequence
NEELDAMIK

SEQ ID NO: 93 - protein, 18 aa, Artificial
  helical interface sequence
GKEQRILAKTIKRARILG

SEQ ID NO: 94 - protein, 13 aa, Artificial
  helical interface sequence
MVTANRFWSQIFG

SEQ ID NO: 95 - protein, 27 aa, Artificial
  helical interface sequence
FVIIAVVLIISTLLQKGRGDVGAAFGG

SEQ ID NO: 96 - protein, 110 aa, Artificial
  helical interface sequence
ASMKEEFTRLKEALEKSEARRKELEEKMVSLLQEKNDLQLQVQAEQDNLADAEERCDQLIKNKIQLEAKVKEMNERLEDEEEMNAELTAKKRKLEDECSELKRDIDDLEL

SEQ ID NO: 97 - protein, 8 aa, Artificial
  helical interface sequence
PEMVAAKR

SEQ ID NO: 98 - protein, 34 aa, Artificial
  helical interface sequence
AGTAAQAAVVRFQEAANKQKQELDEISTNIRQAG

SEQ ID NO: 99 - protein, 20 aa, Artificial
  helical interface sequence
VERRESIFCIQYNVRSFMNV

SEQ ID NO: 100 - protein, 25 aa, Artificial
  helical interface sequence
DPLVDVLPVIPVLFLALAFVWQAAV

SEQ ID NO: 101 - protein, 27 aa, Artificial
  helical interface sequence
FVIIAVVLIISTLLQKGRGDVGAAFGG

SEQ ID NO: 102 - protein, 14 aa, Artificial
  helical interface sequence
AIDELRHSQTQQHA

SEQ ID NO: 103 - protein, 12 aa, Artificial
  helical interface sequence
PMEVMLRAVFMQ

SEQ ID NO: 104 - protein, 33 aa, Artificial
  helical interface sequence
DYGRYKINEYTKYLTLFVATVQSLGIAFWIRGQ

SEQ ID NO: 105 - protein, 17 aa, Artificial
  helical interface sequence
VALNHHINQALKAHVAM

SEQ ID NO: 106 - protein, 83 aa, Artificial
  helical interface sequence
AAITIQRYVRGHQARCYATFLRRTRAAIIIQKFQRMYVVRKRYQCMRDATIALQALLRGYLVRNKYQMMLREHKSIIIQKHVR

SEQ ID NO: 107 - protein, 19 aa, Artificial
  helical interface sequence
FYATFLIQEYFRKFKKRKE

SEQ ID NO: 108 - protein, 9 aa, Artificial
  helical interface sequence
IISMFQAHI

SEQ ID NO: 109 - protein, 15 aa, Artificial
  helical interface sequence
GFPINFLTLYVTVQH

SEQ ID NO: 110 - protein, 29 aa, Artificial
  helical interface sequence
GLIYEEVRAVLKSFLESVIRDSVTYTEHA

SEQ ID NO: 111 - protein, 97 aa, Artificial
  helical interface sequence
SEARRKELEEKMVSLLQEKNDLQLQVQAEQDNLADAEERCDQLIKNKIQLEAKVKEMNERLEDEEEMNAELTAKKRKLEDECSELKRDIDDLELTLA

SEQ ID NO: 112 - protein, 19 aa, Artificial
  helical interface sequence
ERRESIFCIQYNVRSFMNV

SEQ ID NO: 113 - protein, 100 aa, Artificial
  helical interface sequence
KPVLRDLKDRVAKFSDTSTTMYQYVNMIDNKLVKTQKQRKDNDIILSEYNTEMELHYNYIKDNLDNNIPSSLRVLRAVIDSLHKKIQKLENAIATQTDYC

SEQ ID NO: 114 - protein, 9 aa, Artificial
  helical interface sequence
EIKNMWAAF

SEQ ID NO: 115 - protein, 49 aa, Artificial
  helical interface sequence
DERLSKIISMFQAHIRGYLIRKAYKKLQDQRIGLSVIQRNIRKWLVLRN

SEQ ID NO: 116 - protein, 12 aa, Artificial
  helical interface sequence
PMEVMLRAVFMQ

SEQ ID NO: 117 - protein, 9 aa, Artificial
  helical interface sequence
VVYDVTSWT

SEQ ID NO: 118 - protein, 21 aa, Artificial
  helical interface sequence
FAKSKWKQAFNATAVVRHMRK

SEQ ID NO: 119 - protein, 12 aa, Artificial
  helical interface sequence
PMEVMLRAVFMQ

SEQ ID NO: 120 - protein, 12 aa, Artificial
  helical interface sequence
FILREKITHFDH

SEQ ID NO: 121 - protein, 49 aa, Artificial; identical to SEQ ID NO: 115
  helical interface sequence

SEQ ID NO: 122 - protein, 11 aa, Artificial
  helical interface sequence
EDQCNDIFTFC

SEQ ID NO: 123 - protein, 20 aa, Artificial
  helical interface sequence
WRDRFLFCAEALYKAQAETG

SEQ ID NO: 124 - protein, 27 aa, Artificial
  helical interface sequence
PEKRKLIQQQLVLLLHAHKCQRREQAN

SEQ ID NO: 125 - protein, 64 aa, Artificial
  helical interface sequence
SAVLSLFQSINGMHPQLLELLNQLDERRLYYEGLQDKLAQIRDARGALSALREEHREKLRRAAE

SEQ ID NO: 126 - protein, 19 aa, Artificial
  helical interface sequence
LERDVSRAVELLERLQRSG

SEQ ID NO: 127 - protein, 22 aa, Artificial
  helical interface sequence
AQGALANIAVNKANLDVMKERS

SEQ ID NO: 128 - protein, 5 aa, Artificial
  helical interface sequence
RAERR

SEQ ID NO: 129 - protein, 55 aa, Artificial
  helical interface sequence
KLRAACIRIQKTIRGWLLRKRYLCMQRAAITVQRYVRGYQARCYAKFLRRTKAAT

SEQ ID NO: 130 - protein, 48 aa, Artificial
  helical interface sequence
FAELQDLARQLHARVDKVDEERYDIEAKVTKNITEIADLTQKIFDLRG

SEQ ID NO: 131 - protein, 10 aa, Artificial
  helical interface sequence
EEVEELLENQ

SEQ ID NO: 132 - protein, 15 aa, Artificial
  helical interface sequence
FKKLAEAVKFSAKLM

SEQ ID NO: 133 - protein, 12 aa, Artificial
  helical interface sequence
PMEVMLRAVFMQ

SEQ ID NO: 134 - protein, 16 aa, Artificial
  helical interface sequence
FYATFLIQEYFRKFKK

SEQ ID NO: 135 - protein, 15 aa, Artificial
  helical interface sequence
KANREKMTQIMFETF

SEQ ID NO: 136 - protein, 47 aa, Artificial
  helical interface sequence
FAELQDLARQLHARVDKVDEERYDIEAKVTKNITEIADLTQKIFDLR

SEQ ID NO: 137 - protein, 46 aa, Artificial
  helical interface sequence
EDQLREKAKELWQTIYNLEAEKFDLQEKFKQQKYEINVLRNRINDN

SEQ ID NO: 138 - protein, 24 aa, Artificial
  helical interface sequence
YYVESLTRSLADAAWKEFQEVEKL

SEQ ID NO: 139 - protein, 36 aa, Artificial
  helical interface sequence
HIANIGRLVEDMENKIRSTLNEIYFGKTKDIVNGLR

SEQ ID NO: 140 - protein, 12 aa, Artificial
  helical interface sequence
TRKLTRLLREKG

SEQ ID NO: 141 - protein, 62 aa, Artificial
  helical interface sequence
RHYLFDVQRNNIAMALEVTYRERLHRVYREVKNRLDYHISVQNMMRQKEQEHMINWVEKRVV

SEQ ID NO: 142 - protein, 8 aa, Artificial
  helical interface sequence
ILYVQTES

SEQ ID NO: 143 - protein, 17 aa, Artificial
  helical interface sequence
LLQGRLFSYTDTQISRL

SEQ ID NO: 144 - protein, 8 aa, Artificial
  helical interface sequence
VTANRFWS

SEQ ID NO: 145 - protein, 22 aa, Artificial
  helical interface sequence
VSQVLEIHVELMDTFSKQLKLE

SEQ ID NO: 146 - protein, 47 aa, Artificial
  helical interface sequence
NVYDLLKDLEEGIQTLMGRLLLKNYGLLYCFNKDMSKVSTYLRTVQC

SEQ ID NO: 147 - protein, 25 aa, Artificial
  helical interface sequence
YYQGLTLHGVLNAIVFTQLFAQAIM

SEQ ID NO: 148 - protein, 16 aa, Artificial
  helical interface sequence
NFGLHANVEAWKVLSK

SEQ ID NO: 149 - protein, 6 aa, Artificial
  helical interface sequence
LTDILS

SEQ ID NO: 150 - protein, 64 aa, Artificial
  helical interface sequence
QKRHYLFDVQRNNIAMALEVTYRERLHRVYREVKNRLDYHISVQNMMRQKEQEHMINWVEKRVV

SEQ ID NO: 151 - protein, 22 aa, Artificial
  helical interface sequence
VSQVLEIHVELMDTFSKQLKLE

SEQ ID NO: 152 - protein, 24 aa, Artificial
  helical interface sequence
YFVIKDLFALALVLLGFFAVVAYM

SEQ ID NO: 153 - protein, 26 aa, Artificial
  helical interface sequence
MRYIHANGASLFFLAVYIHIFRGLYY

SEQ ID NO: 154 - protein, 23 aa, Artificial
  helical interface sequence
LICGLRQLANETTQALQLFLRAT

SEQ ID NO: 155 - protein, 17 aa, Artificial
  helical interface sequence
AVPTGIKVFSWIATMWG

SEQ ID NO: 156 - protein, 45 aa, Artificial
  helical interface sequence
RIGEIVKVVQAAARGWVERKHFRQAREKSVSARIIQDNIRAYLEF

SEQ ID NO: 157 - protein, 10 aa, Artificial
  helical interface sequence
VRLEHVARTL

SEQ ID NO: 158 - protein, 8 aa, Artificial
  helical interface sequence
PEMVAAKR

SEQ ID NO: 159 - protein, 13 aa, Artificial
  helical interface sequence
PMEVMLRAVFMQQ

SEQ ID NO: 160 - protein, 11 aa, Artificial
  helical interface sequence
DAEFASLFDTL

SEQ ID NO: 161 - protein, 27 aa, Artificial
  helical interface sequence
NEVLFLMTKCTELFVRHLAGAAYTEEF

SEQ ID NO: 162 - protein, 28 aa, Artificial
  helical interface sequence
AGAPVYLAAVLEYLTAEILELAGNAARD

SEQ ID NO: 163 - protein, 23 aa, Artificial
  helical interface sequence
EMEFTEAESNMNDLVSEYQQYQD

SEQ ID NO: 164 - protein, 31 aa, Artificial
  helical interface sequence
NHWLICSRWKKVQWCSLSVIKLKNKIKYRAE

SEQ ID NO: 165 - protein, 8 aa, Artificial
  helical interface sequence
NLGMEVMH

SEQ ID NO: 166 - protein, 52 aa, Artificial
  helical interface sequence
EANYRKDFIDTMTRELYDAFLHERLYLIYMDSRAELKRNSTLKKKFFEKWQA

SEQ ID NO: 167 - protein, 21 aa, Artificial
  helical interface sequence
FAKSKWKQAFNATAVVRHMRK

SEQ ID NO: 168 - protein, 8 aa, Artificial
  helical interface sequence
PYAAQLAA

SEQ ID NO: 169 - protein, 6 aa, Artificial
  helical interface sequence
EDAAVF

SEQ ID NO: 170 - protein, 28 aa, Artificial
  helical interface sequence
SLSISALLAVTVFLLLLADKVPETSLSV

SEQ ID NO: 171 - protein, 53 aa, Artificial
  helical interface sequence
KRMENLNNKVDDGFLDIWTYNAELLVLLENERTLDFHDSNVKNLYEKVKSQLK

SEQ ID NO: 172 - protein, 30 aa, Artificial
  helical interface sequence
VAQLEKEVAQAEAENYQLEQEVAQLEHECG

SEQ ID NO: 173 - protein, 10 aa, Artificial
  helical interface sequence
RQCFREKAND

SEQ ID NO: 174 - protein, 12 aa, Artificial
  helical interface sequence
PMEVMLRAVFMQ

SEQ ID NO: 175 - protein, 53 aa, Artificial; identical to SEQ ID NO: 171
  helical interface sequence

SEQ ID NO: 176 - protein, 5 aa, Artificial
  helical interface sequence
AHCLL

SEQ ID NO: 177 - protein, 11 aa, Artificial
  helical interface sequence
MRRAMELMLTN

SEQ ID NO: 178 - protein, 24 aa, Artificial
  helical interface sequence
YFIIKDVFALAVVLLVFFAIVGFM

SEQ ID NO: 179 - protein, 7 aa, Artificial
  helical interface sequence
PYNAIAF

SEQ ID NO: 180 - protein, 18 aa, Artificial
  helical interface sequence
GPDYRVLVDKSRKVAHTS

SEQ ID NO: 181 - protein, 22 aa, Artificial
  helical interface sequence
QFLTIARLRALREAWARIGEVF

SEQ ID NO: 182 - protein, 21 aa, Artificial
  helical interface sequence
LMSLMQMAKTSAALAKMQERG

SEQ ID NO: 183 - protein, 21 aa, Artificial
  helical interface sequence
PWKSARLMVHTVATFNSIKER

SEQ ID NO: 184 - protein, 15 aa, Artificial
  helical interface sequence
MKLELAQYREVAAFA

SEQ ID NO: 185 - protein, 17 aa, Artificial
  helical interface sequence
RKWQKTGHAVRAIGRLS

SEQ ID NO: 186 - protein, 15 aa, Artificial
  helical interface sequence
AFGKNLLPRVAAKLE

SEQ ID NO: 187 - protein, 45 aa, Artificial
  helical interface sequence
EDQLREKAKELWQTIYNLEAEKFDLQEKFKQQKYEINVLRNRIND

SEQ ID NO: 188 - protein, 82 aa, Artificial
  helical interface sequence
KQVITEQIANDLVKEVVNSSVISIVKREFSEANYRKDFIDTMTRELYDAFLHERLYLIYMDSRAELKRNSTLKKKFFEKWQA

SEQ ID NO: 189 - protein, 14 aa, Artificial
  helical interface sequence
RYEIARVISARALQ

SEQ ID NO: 190 - protein, 80 aa, Artificial
  helical interface sequence
VITEQIANDLVKEVVNSSVISIVKREFSEANYRKDFIDTMTRELYDAFLHERLYLIYMDSRAELKRNSTLKKKFFEKWQA

SEQ ID NO: 191 - protein, 16 aa, Artificial
  helical interface sequence
RWKLDFSIVSLCNHLT

SEQ ID NO: 192 - protein, 19 aa, Artificial
  helical interface sequence
YLVKNQNLHIDYLAKKLHD

SEQ ID NO: 193 - protein, 14 aa, Artificial
  helical interface sequence
TAAERWALFWRWTM

SEQ ID NO: 194 - protein, 20 aa, Artificial
  helical interface sequence
EIWIAQELRRIGDEFNAYYA

SEQ ID NO: 195 - protein, 15 aa, Artificial
  helical interface sequence
LALLFATYGGEAEGG

SEQ ID NO: 196 - protein, 22 aa, Artificial
  helical interface sequence
LMEINTSGTFLTQALNHMYKLR

SEQ ID NO: 197 - protein, 24 aa, Artificial
  helical interface sequence
YFIIKDVFALAVVLLVFFAIVGFM

SEQ ID NO: 198 - protein, 18 aa, Artificial
  helical interface sequence
GPDYRVLVDKSRKVAHTS

SEQ ID NO: 199 - protein, 12 aa, Artificial
  helical interface sequence
IFRFLLFFQGFH

SEQ ID NO: 200 - protein, 26 aa, Artificial
  helical interface sequence
ADDLDQFIKNYLDIRTQYHLRREKLA

SEQ ID NO: 201 - protein, 8 aa, Artificial
  helical interface sequence
IVEQCCTS

SEQ ID NO: 202 - protein, 96 aa, Artificial
  helical interface sequence
KQALSEIETRHSEIIKLENSIRELHDMFMDMAMLVESQGEMIDRIEYNVEHAVDYVERAVSDTKKAVKYQSKARRKKIMIIICCVILGIIIASTIG

SEQ ID NO: 203 - protein, 9 aa, Artificial
  helical interface sequence
SALFRENLN

SEQ ID NO: 204 - protein, 27 aa, Artificial
  helical interface sequence
PEIRIAQELRRIGDEFNETYTRRVFAN

SEQ ID NO: 205 - protein, 12 aa, Artificial
  helical interface sequence
GVWFTALGISTM

SEQ ID NO: 206 - protein, 12 aa, Artificial
  helical interface sequence
IFRFLLFFQGFH

SEQ ID NO: 207 - protein, 46 aa, Artificial; identical to SEQ ID NO: 137
  helical interface sequence

SEQ ID NO: 208 - protein, 15 aa, Artificial
  helical interface sequence
LALLFATYGGEAEGG

SEQ ID NO: 209 - protein, 24 aa, Artificial
  helical interface sequence
KDVLAALIPKEQARIKTFRQQHGG

SEQ ID NO: 210 - protein, 16 aa, Artificial
  helical interface sequence
DDEMEEERRLAYVGIT

SEQ ID NO: 211 - protein, 18 aa, Artificial
  helical interface sequence
QSFWEARAKALESLLIEK

SEQ ID NO: 212 - protein, 29 aa, Artificial
  helical interface sequence
AGAPVYLAAVLEYLTAEILELAGNAARDN

SEQ ID NO: 213 - protein, 22 aa, Artificial
  helical interface sequence
RPEIWIAQELRRIGDEFNAYYA

SEQ ID NO: 214 - protein, 38 aa, Artificial
  helical interface sequence
PEAQAKVDVFREDLCTKTENLLGSYFPKKISELDAFLK

SEQ ID NO: 215 - protein, 19 aa, Artificial
  helical interface sequence
TATQARCRGFLMRVEYRAM

SEQ ID NO: 216 - protein, 9 aa, Artificial
  helical interface sequence
SALFRENLN

SEQ ID NO: 217 - protein, 24 aa, Artificial
  helical interface sequence
YFIIKDVFALAVVLLVFFAIVGFM

SEQ ID NO: 218 - protein, 52 aa, Artificial; identical to SEQ ID NO: 166
  helical interface sequence

SEQ ID NO: 219 - protein, 9 aa, Artificial
  helical interface sequence
SALFRENLN

SEQ ID NO: 220 - protein, 18 aa, Artificial
  helical interface sequence
AIYEKAKEVSSALSKVLS

SEQ ID NO: 221 - protein, 16 aa, Artificial
  helical interface sequence
TWHLFYGYGYVVAQDR

SEQ ID NO: 222 - protein, 15 aa, Artificial
  helical interface sequence
GFPINFLTLYVTVQH

SEQ ID NO: 223 - protein, 19 aa, Artificial
  helical interface sequence
FYDWIKEFIRDQGEFIAQQ

SEQ ID NO: 224 - protein, 15 aa, Artificial
  helical interface sequence
MDKINNRFNYLFEVN

SEQ ID NO: 225 - protein, 50 aa, Artificial
  helical interface sequence
KLNDILHVYEKSKERELQSQLFNAWRNRFCFYTEECNIQAISKRNYQLEK

SEQ ID NO: 226 - protein, 35 aa, Artificial
  helical interface sequence
PVVRLGLRWGFILFIMSEVMFFSAWFWSFFKHALY

SEQ ID NO: 227 - protein, 11 aa, Artificial
  helical interface sequence
MRRAMELMLTD

SEQ ID NO: 228 - protein, 23 aa, Artificial
  helical interface sequence
AQGALANIAVDKANLDVMKERSN

SEQ ID NO: 229 - protein, 29 aa, Artificial
  helical interface sequence
AGAPVYLAAVLEYLTAEILELAGNAARDN

SEQ ID NO: 230 - protein, 27 aa, Artificial
  helical interface sequence
IYEETRGVLKVFLENVIRDAVTYTEHA

SEQ ID NO: 231 - protein, 29 aa, Artificial
  helical interface sequence
AGAPVYLAAVLEYLTAEILELAGNAARDN

SEQ ID NO: 232 - protein, 29 aa, Artificial
  helical interface sequence
AGAPVYLAAVLEYLTAEILELAGNAARDN

SEQ ID NO: 233 - protein, 30 aa, Artificial
  helical interface sequence
MTLLMIGLTTNMLTMYQWWRDVIRESTFQG

SEQ ID NO: 234 - protein, 17 aa, Artificial
  helical interface sequence
CWAFGAVEAISDRICIH

SEQ ID NO: 235 - protein, 38 aa, Artificial
  helical interface sequence
LVSEKAATFLVEYARKYRQTIAAAAVVLEEFAHALTTG

SEQ ID NO: 236 - protein, 14 aa, Artificial
  helical interface sequence
TAAERAALFWRWTM

SEQ ID NO: 237 - protein, 27 aa, Artificial
  helical interface sequence
AVEAIKYIAEQLESASEFDDLKKDWQY

SEQ ID NO: 238 - protein, 13 aa, Artificial
  helical interface sequence
IIARRWINGMLIS

SEQ ID NO: 239 - protein, 29 aa, Artificial
  helical interface sequence
AGAPVYLAAVLEYLTAEILELAGNAARDN

SEQ ID NO: 240 - protein, 25 aa, Artificial
  helical interface sequence
PLQQKLDEFGEQLSKVISLICVAVW

SEQ ID NO: 241 - protein, 11 aa, Artificial
  helical interface sequence
DWEDGYRQRWQ

SEQ ID NO: 242 - protein, 50 aa, Artificial
  helical interface sequence
PELLHLEAMCHQMGPLIDEKLEDIDRKHSELSELNVKVMEALSLYTKLMN

SEQ ID NO: 243 - protein, 38 aa, Artificial; identical to SEQ ID NO: 214
  helical interface sequence

SEQ ID NO: 244 - protein, 39 aa, Artificial
  helical interface sequence
GDYRQLVHELDEAEYRDIRLMVMEIRNAYAVLYDIILKN

SEQ ID NO: 245 - protein, 11 aa, Artificial
  helical interface sequence
DWEDGYRQRWQ

SEQ ID NO: 246 - protein, 10 aa, Artificial
  helical interface sequence
VRLEHVARTL

SEQ ID NO: 247 - protein, 20 aa, Artificial
  helical interface sequence
FKEFMYEWIIGQFERSLIDL

SEQ ID NO: 248 - protein, 28 aa, Artificial
  helical interface sequence
KWRLLAMMTLFFGSGFAAPFFIVRHQLL

SEQ ID NO: 249 - protein, 9 aa, Artificial
  helical interface sequence
PISNLLRVA

SEQ ID NO: 250 - protein, 26 aa, Artificial
  helical interface sequence
PFHQLGVAGVFGGALFCAMHGSLVTS

SEQ ID NO: 251 - protein, 25 aa, Artificial
  helical interface sequence
AEKVAKCYRDIDHYMRLINYCLVVG

SEQ ID NO: 252 - protein, 29 aa, Artificial
  helical interface sequence
AGAPVYLAAVMEYLAAEVLELAGNAARDN

SEQ ID NO: 253 - protein, 21 aa, Artificial
  helical interface sequence
KRDAKELVELFFEEIRRALEN

SEQ ID NO: 254 - protein, 7 aa, Artificial
  helical interface sequence
FQGFHNW

SEQ ID NO: 255 - protein, 30 aa, Artificial
  helical interface sequence
VAIGSQRYKLGVRLYYRVMESMLKSEEERL

SEQ ID NO: 256 - protein, 6 aa, Artificial
  helical interface sequence
PRCAWR

SEQ ID NO: 257 - protein, 28 aa, Artificial
  helical interface sequence
SMEAERVRVFHKQAFEYISIALRIDEDE

SEQ ID NO: 258 - protein, 38 aa, Artificial; identical to SEQ ID NO: 214
  helical interface sequence

SEQ ID NO: 259 - protein, 17 aa, Artificial
  helical interface sequence
KKQFREFLDYQKWRKSQ

SEQ ID NO: 260 - protein, 9 aa, Artificial
  helical interface sequence
IDTLILDTI

SEQ ID NO: 261 - protein, 11 aa, Artificial
  helical interface sequence
FFQFAEMIVKM

SEQ ID NO: 262 - protein, 27 aa, Artificial
  helical interface sequence
IYEETRGVLKVFLENVIRDAVTYTEHA

SEQ ID NO: 263 - protein, 5 aa, Artificial
  helical interface sequence
NVLMG

SEQ ID NO: 264 - protein, 11 aa, Artificial
  helical interface sequence
DWEDGYRQRWQ

SEQ ID NO: 265 - protein, 12 aa, Artificial
  helical interface sequence
AIYVYKVLKQVH

SEQ ID NO: 266 - protein, 22 aa, Artificial
  helical interface sequence
NVRAQLVDMKRLEVDIDIKIRS

SEQ ID NO: 267 - protein, 17 aa, Artificial
  helical interface sequence
MGKVYAALMIFDFYKQN

SEQ ID NO: 268 - protein, 19 aa, Artificial
  helical interface sequence
TPCREGVAGFMVNLFAKIG

SEQ ID NO: 269 - protein, 13 aa, Artificial
  helical interface sequence
MRVQAHIRKRMVA

SEQ ID NO: 270 - protein, 82 aa, Artificial; identical to SEQ ID NO: 188
  helical interface sequence

SEQ ID NO: 271 - protein, 29 aa, Artificial
  helical interface sequence
AGAPVYLAAVLEYLTAEILELAGNAARDN

SEQ ID NO: 272 - protein, 12 aa, Artificial
  helical interface sequence
PETDIVGNLWMK

SEQ ID NO: 273 - protein, 74 aa, Artificial
  helical interface sequence
IVETINILKPGLEGAQQLDENYGHVSTELRRRIVTLKQRVATQVNRIKALQNSIQEQVVEMKRLEVDIDIKIRA

SEQ ID NO: 274 - protein, 12 aa, Artificial
  helical interface sequence
LFIAGWLFVSTG

SEQ ID NO: 275 - protein, 34 aa, Artificial
  helical interface sequence
ATISVIIFSLAIGVYLWILDLTFTKIISFILSLR

SEQ ID NO: 276 - protein, 25 aa, Artificial
  helical interface sequence
YRTYNLMQDGQESYVQSLFDQFNER

SEQ ID NO: 277 - protein, 44 aa, Artificial
  helical interface sequence
RDKAKMRNLETQHKVLELTAENERLQKKVEQLSRELSTLRNLFK

SEQ ID NO: 278 - protein, 13 aa, Artificial
  helical interface sequence
DEKVVKGLIEFFT

SEQ ID NO: 279 - protein, 23 aa, Artificial
  helical interface sequence
EGNTYFWHAFWFAIGVAWIGYWS

SEQ ID NO: 280 - protein, 30 aa, Artificial
  helical interface sequence
AFGKREQAEEERYFRARAKEQLAALKKHHE

SEQ ID NO: 281 - protein, 29 aa, Artificial
  helical interface sequence
SGAPVYLTAVLEYLAAEILELAGNAARDN

SEQ ID NO: 282 - protein, 13 aa, Artificial
  helical interface sequence
DEKVVKGLIEFFT

SEQ ID NO: 283 - protein, 15 aa, Artificial
  helical interface sequence
TQNEKLSAFYETLKS

SEQ ID NO: 284 - protein, 42 aa, Artificial
  helical interface sequence
TLFALVRTALRIKTEGNLEQANEELRAIIKKIWKRTSMKLLD

SEQ ID NO: 285 - protein, 28 aa, Artificial
  helical interface sequence
DQQKVSEIFQSSKEKLQGDAKVVSDAFK

SEQ ID NO: 286 - protein, 23 aa, Artificial
  helical interface sequence
VADARVLVDFARISAQQEKVTYG

SEQ ID NO: 287 - protein, 54 aa, Artificial
  helical interface sequence
SAVMERLRRRIELCRRHHSTCEARYEAVSPERLELERQHTFALHQRCIQAKAKR

SEQ ID NO: 288 - protein, 37 aa, Artificial
  helical interface sequence
PEHDHRKRMGLKMLLMMGLLLPLVYAMKRHKWSVLKS

SEQ ID NO: 289 - protein, 12 aa, Artificial
  helical interface sequence
PRKVRLVVDLIR

SEQ ID NO: 290 - protein, 16 aa, Artificial
  helical interface sequence
IWELNTFATCECLAWR

SEQ ID NO: 291 - protein, 12 aa, Artificial
  helical interface sequence
SFISILIFKGLF

SEQ ID NO: 292 - protein, 12 aa, Artificial
  helical interface sequence
PQNFRLLGNVLA

SEQ ID NO: 293 - protein, 28 aa, Artificial
  helical interface sequence
KWRLLAMMTLFFGSGFAAPFFIVRHQLL

SEQ ID NO: 294 - protein, 8 aa, Artificial
  helical interface sequence
QVGYWAVK

SEQ ID NO: 295 - protein, 13 aa, Artificial
  helical interface sequence
GEYRRRWKREVLG

SEQ ID NO: 296 - protein, 17 aa, Artificial
  helical interface sequence
PQEFFFHAMGGREGLID

SEQ ID NO: 297 - protein, 15 aa, Artificial
  helical interface sequence
DSYVEPLKLYLQKFR

SEQ ID NO: 298 - protein, 20 aa, Artificial
  helical interface sequence
WAREIGAQLRRIADDLNAQY

SEQ ID NO: 299 - protein, 80 aa, Artificial; identical to SEQ ID NO: 190
  helical interface sequence

SEQ ID NO: 300 - protein, 29 aa, Artificial
  helical interface sequence
AGAPVYLAAVLEYLTAEILELAGNAARDN

SEQ ID NO: 301 - protein, 6 aa, Artificial
  helical interface sequence
SDGFIS

SEQ ID NO: 302 - protein, 29 aa, Artificial
  helical interface sequence
AEAPVLFAKAAQIFITELTLRAWIHTEDN

SEQ ID NO: 303 - protein, 19 aa, Artificial
  helical interface sequence
EAVFLRGVDIYTRLLPALA

SEQ ID NO: 304 - protein, 27 aa, Artificial
  helical interface sequence
IYEETRGVLKVFLENVIRDAVTYTEHA

SEQ ID NO: 305 - protein, 27 aa, Artificial
  helical interface sequence
PLLAFLVIIQIAFGSIILIYLDEIVSK

SEQ ID NO: 306 - protein, 18 aa, Artificial
  helical interface sequence
PDVAAEIKRWGTWYANEL

SEQ ID NO: 307 - protein, 32 aa, Artificial
  helical interface sequence
DTIRQTAVFAALDKVDNAQMIQMERLFIAKLV

SEQ ID NO: 308 - protein, 24 aa, Artificial
  helical interface sequence
YFIIKDVFALAVVLLVFFAIVGFM

SEQ ID NO: 309 - protein, 46 aa, Artificial
  helical interface sequence
LRRRKLASFLKDFDREVEIRIKQIESDRQNLLKEVDNLYNIEILRL

SEQ ID NO: 310 - protein, 22 aa, Artificial
  helical interface sequence
PEIWIAQEARRIGDEANAYYAR

SEQ ID NO: 311 - protein, 33 aa, Artificial; identical to SEQ ID NO: 104
  helical interface sequence

SEQ ID NO: 312 - protein, 36 aa, Artificial
  helical interface sequence
HDHRKRMGLKMLLMMGLLLPLVYAMKRHKWSVLKSR

SEQ ID NO: 313 - protein, 6 aa, Artificial
  helical interface sequence
PKMRNL

SEQ ID NO: 314 - protein, 19 aa, Artificial
  helical interface sequence
NSMERVEWLRKKLQDVHNF

SEQ ID NO: 315 - protein, 32 aa, Artificial
  helical interface sequence
VLGNLEEMRDERLSKIISMFQAHIRGYLIRKA

SEQ ID NO: 316 - protein, 29 aa, Artificial
  helical interface sequence
VGAPVYMAAVLEYLTAEILELAVNAARDN

SEQ ID NO: 317 - protein, 61 aa, Artificial
  helical interface sequence
TRHSEIIKLENSIRELHDMFMDMAMLVESQGEMIDRIEYNVEHAVDYVERAVSDTKKAVKY

SEQ ID NO: 318 - protein, 65 aa, Artificial
  helical interface sequence
RADQLADESLESTRRMLQLVEESKDAGIRTLVMLDEQGEQLDRVEEGMNHINQDMKEAEKNLKDL

SEQ ID NO: 319 - protein, 35 aa, Artificial
  helical interface sequence
PAVQKGLRYGMILFIISEVLFFTGFFWAFYHSSLA

SEQ ID NO: 320 - protein, 29 aa, Artificial
  helical interface sequence
TTVSQMHIYTGMDRLGIGQYLSRIALMID

SEQ ID NO: 321 - protein, 14 aa, Artificial
  helical interface sequence
YGTWHHRCWLLSRL

SEQ ID NO: 322 - protein, 23 aa, Artificial
  helical interface sequence
DEEIQKEITARVKALESMLIEQG

SEQ ID NO: 323 - protein, 13 aa, Artificial
  helical interface sequence
DEKVVKGLIEFFT

SEQ ID NO: 324 - protein, 35 aa, Artificial; identical to SEQ ID NO: 319
  helical interface sequence

SEQ ID NO: 325 - protein, 27 aa, Artificial
  helical interface sequence
IYEETRGVLKVFLENVIRDAVTYTEHA

SEQ ID NO: 326 - protein, 27 aa, Artificial
  helical interface sequence
IYEETRGVLKVFLENVIRDAVTYTEHA

SEQ ID NO: 327 - protein, 24 aa, Artificial
  helical interface sequence
PVEYLLVALSGCLTTSLVAHAAAR

SEQ ID NO: 328 - protein, 31 aa, Artificial
  helical interface sequence
PVEDYELTLKIEIVKERGANLLSRLYRYQDS

SEQ ID NO: 329 - protein, 52 aa, Artificial
  helical interface sequence
RIQDLEKYVEDTKIDLWSYNAELLVALENQHTIDLTDSEMNKLFEKTRRQLR

SEQ ID NO: 330 - protein, 14 aa, Artificial
  helical interface sequence
AHTLQEMLTLKSDD

SEQ ID NO: 331 - protein, 29 aa, Artificial
  helical interface sequence
AGAPVYLAAVLEYLTAEILELAGNAARDN

SEQ ID NO: 332 - protein, 77 aa, Artificial
  helical interface sequence
QIANDLVKEVVNSSVISIVKREFSEANYRKDFIDTMTRELYDAFLHERLYLIYMDSRAELKRNSTLKKKFFEKWQAS

SEQ ID NO: 333 - protein, 11 aa, Artificial
  helical interface sequence
AADLRRLRGAV

SEQ ID NO: 334 - protein, 34 aa, Artificial
  helical interface sequence
PLAHDQQWLDHFVLYIITAVTIFVCLLLLICIVR

SEQ ID NO: 335 - protein, 22 aa, Artificial
  helical interface sequence
WEQLLTTIARTINEVENQILTR

SEQ ID NO: 336 - protein, 43 aa, Artificial
  helical interface sequence
LGEFLKLDRERAKNKIAKETNNKKKEFEETAKKVRRAIEQLAA

SEQ ID NO: 337 - protein, 61 aa, Artificial
  helical interface sequence
EMELEIDRNLDQIQQVSNRLKKMALTTGKELDSQQKRLNNIEESTDDLDINLHMNTNRLAG

SEQ ID NO: 338 - protein, 15 aa, Artificial
  helical interface sequence
ERQYYQLFLNLLEAQ

SEQ ID NO: 339 - protein, 38 aa, Artificial
  helical interface sequence
AKRTSRFLSGIINFIHFREACRETYMEFLWQYKSSADK

SEQ ID NO: 340 - protein, 10 aa, Artificial
  helical interface sequence
FGRYSKYIIQ

SEQ ID NO: 341 - protein, 33 aa, Artificial
  helical interface sequence
IYGANFFMATGFHGFHVIVGTIFLLVCLIRVQR

SEQ ID NO: 342 - protein, 14 aa, Artificial
  helical interface sequence
RNFRLLEELEEGQK

SEQ ID NO: 343 - protein, 22 aa, Artificial
  helical interface sequence
AQGALANIAVDKANLDVMKERS

SEQ ID NO: 344 - protein, 13 aa, Artificial
  helical interface sequence
LFQFGEMILQKTG

SEQ ID NO: 345 - protein, 13 aa, Artificial
  helical interface sequence
WYIEALAQVFSER

SEQ ID NO: 346 - protein, 95 aa, Artificial
  helical interface sequence
QALSEIETRHSEIIKLENSIRELHDMFMDMAMLVESQGEMIDRIEYNVEHAVDYVERAVSDTKKAVKYQSKARRKKIMIIICCVILGIIIASTIG

SEQ ID NO: 347 - protein, 17 aa, Artificial
  helical interface sequence
KWQKTGHAVRAIGRLSS

SEQ ID NO: 348 - protein, 22 aa, Artificial
  helical interface sequence
IVGCIAAGILAILQGFEVNWHN

SEQ ID NO: 349 - protein, 10 aa, Artificial
  helical interface sequence
DWGERQWLIE

SEQ ID NO: 350 - protein, 41 aa, Artificial
  helical interface sequence
LSLLTKAKLHIKKLEDSDRKAVHQIDQLQREQRHLKRQLEK

SEQ ID NO: 351 - protein, 13 aa, Artificial
  helical interface sequence
DEKVVKGLIEFFT

SEQ ID NO: 352 - protein, 20 aa, Artificial
  helical interface sequence
WRDRFLFVAEAIYKAQAETG

SEQ ID NO: 353 - protein, 32 aa, Artificial
  helical interface sequence
FTHLVWLVAYAWAIYWGASYFTEQDGTWHQTI

SEQ ID NO: 354 - protein, 16 aa, Artificial
  helical interface sequence
IWELNTFATCECLAWR

SEQ ID NO: 355 - protein, 10 aa, Artificial
  helical interface sequence
EMEVWALEAY

SEQ ID NO: 356 - protein, 15 aa, Artificial
  helical interface sequence
VPLGAGIALACKYNG

SEQ ID NO: 357 - protein, 13 aa, Artificial
  helical interface sequence
PMEVMLRAVFMQQ

SEQ ID NO: 358 - protein, 29 aa, Artificial
  helical interface sequence
PKDALKNACNSIINKLGALKTNFETEWNL

SEQ ID NO: 359 - protein, 18 aa, Artificial
  helical interface sequence
LVDMKRLEVDIDIKIRSC

SEQ ID NO: 360 - protein, 22 aa, Artificial
  helical interface sequence
VFTWSLPFVGEKVTEMLVNVLN

SEQ ID NO: 361 - protein, 10 aa, Artificial
  helical interface sequence
EEGMTKAEKA

SEQ ID NO: 362 - protein, 76 aa, Artificial
  helical interface sequence
KQVITEQIANDLVKEVVNSSVISIVKREFSEANYRKDFIDTMTRELYDAFLHERLYLIYMDSRAELKRNSTLKKKF

SEQ ID NO: 363 - protein, 29 aa, Artificial
  helical interface sequence
TDQQKVSEIFQSSKEKLQGDAKVVSDAFM

SEQ ID NO: 364 - protein, 14 aa, Artificial
  helical interface sequence
TAAERAALFWRWTM

SEQ ID NO: 365 - protein, 34 aa, Artificial
  helical interface sequence
NIPSSLRVLRAVIDSLHKKIQKLENAIATQTDYC

SEQ ID NO: 366 - protein, 30 aa, Artificial
  helical interface sequence
KVKQLVDKVEELLSKNYHLVNEVARLVKLV

SEQ ID NO: 367 - protein, 29 aa, Artificial
  helical interface sequence
AGAPVYLAAVLEYLTAEILELAGNAARDN

SEQ ID NO: 368 - protein, 83 aa, Artificial; identical to SEQ ID NO: 106
  helical interface sequence

SEQ ID NO: 369 - protein, 53 aa, Artificial
  helical interface sequence
RRIENLNKKVDDGFLDIWTYNAELLVLLENERTLDFHDSNVRNLYEKVKSQLK

SEQ ID NO: 370 - protein, 17 aa, Artificial
  helical interface sequence
FSGCGAAYEAAYWAKLG

SEQ ID NO: 371 - protein, 65 aa, Artificial; identical to SEQ ID NO: 318
  helical interface sequence

SEQ ID NO: 372 - protein, 28 aa, Artificial
  helical interface sequence
AGAPVYLAAVLEYLTAEILELAGNAARD

SEQ ID NO: 373 - protein, 22 aa, Artificial
  helical interface sequence
WEKYQLLAETMHLSYADRASYA

SEQ ID NO: 374 - protein, 24 aa, Artificial
  helical interface sequence
YFIFKDLVTVFLFMLILALFVFYS

SEQ ID NO: 375 - protein, 46 aa, Artificial
  helical interface sequence
SQAIKYLQNNIKGFIIRQRVNDEMKVNCATLLQAAYRGHSIRANVF

SEQ ID NO: 376 - protein, 6 aa, Artificial
  helical interface sequence
VSILIP

SEQ ID NO: 377 - protein, 14 aa, Artificial
  helical interface sequence
QGSRLTAYELVYDK

SEQ ID NO: 378 - protein, 13 aa, Artificial
  helical interface sequence
KIVQERLEKVIAS

SEQ ID NO: 379 - protein, 33 aa, Artificial
  helical interface sequence
QDTVKYLERIINRLIFFGALFLSVIALIPILIS

SEQ ID NO: 380 - protein, 39 aa, Artificial; identical to SEQ ID NO: 244
  helical interface sequence

SEQ ID NO: 381 - protein, 65 aa, Artificial
  helical interface sequence
EIETRHSEIIKLENSIRELHDMFMDMAMLVESQGEMIDRIEYNVEHAVDYVERAVSDTKKAVKYQ

SEQ ID NO: 382 - protein, 29 aa, Artificial
  helical interface sequence
AGAPVYLAAVMEYLAAEVLELAGNAARDN

SEQ ID NO: 383 - protein, 19 aa, Artificial
  helical interface sequence
RPEIWIAQELRRIGDEFNA

SEQ ID NO: 384 - protein, 10 aa, Artificial
  helical interface sequence
LINPVELAEN

SEQ ID NO: 385 - protein, 15 aa, Artificial
  helical interface sequence
PEGWLMSIARMQVMH

SEQ ID NO: 386 - protein, 74 aa, Artificial; identical to SEQ ID NO: 273
  helical interface sequence

SEQ ID NO: 387 - protein, 9 aa, Artificial
  helical interface sequence
MVSAFLKQA

SEQ ID NO: 388 - protein, 13 aa, Artificial
  helical interface sequence
QGSRLTAYELVYD

SEQ ID NO: 389 - protein, 11 aa, Artificial
  helical interface sequence
YTDFVRLTVKH

SEQ ID NO: 390 - protein, 23 aa, Artificial
  helical interface sequence
FYLQSKVYRAAERLKWELAQREK

SEQ ID NO: 391 - protein, 29 aa, Artificial
  helical interface sequence
GLIYEETRGVLKVFLENVIRDAVTYTEHA

SEQ ID NO: 392 - protein, 17 aa, Artificial
  helical interface sequence
AAMVFEFLYKMCDVMAA

SEQ ID NO: 393 - protein, 10 aa, Artificial
  helical interface sequence
ADYMAYMLKY

SEQ ID NO: 394 - protein, 80 aa, Artificial; identical to SEQ ID NO: 190
  helical interface sequence

SEQ ID NO: 395 - protein, 8 aa, Artificial
  helical interface sequence
YMQRRLIN

SEQ ID NO: 396 - protein, 18 aa, Artificial
  helical interface sequence
EWEHLPYSLMFAGVAELG

SEQ ID NO: 397 - protein, 27 aa, Artificial
  helical interface sequence
IYEETRGVLKVFLENVIRDAVTYTEHA

SEQ ID NO: 398 - protein, 16 aa, Artificial
  helical interface sequence
IWELNTFATCECLAWR

SEQ ID NO: 399 - protein, 82 aa, Artificial; identical to SEQ ID NO: 188
  helical interface sequence

SEQ ID NO: 400 - protein, 26 aa, Artificial
  helical interface sequence
HAPYVKDKAEEWRYTDRFLQGYSADG

SEQ ID NO: 401 - protein, 28 aa, Artificial
  helical interface sequence
KGALAVILVLTLTILVFWLGVYAVFFAR

SEQ ID NO: 402 - protein, 16 aa, Artificial
  helical interface sequence
DFEILEMAVRELAIEK

SEQ ID NO: 403 - protein, 19 aa, Artificial
  helical interface sequence
PKFSAHALRILNGLDLAIN

SEQ ID NO: 404 - protein, 24 aa, Artificial
  helical interface sequence
PVEYLLVALSGCLTTSLVAHAAAR

SEQ ID NO: 405 - protein, 43 aa, Artificial; identical to SEQ ID NO: 336
  helical interface sequence

SEQ ID NO: 406 - protein, 25 aa, Artificial
  helical interface sequence
YRTYNLMQDGQESYVQSLFDQFNER

SEQ ID NO: 407 - protein, 20 aa, Artificial
  helical interface sequence
FKEFMYEWIIGQFERSLIDL

SEQ ID NO: 408 - protein, 29 aa, Artificial
  helical interface sequence
PKDALKNACNSIINKLGALKTNFETEWNL

SEQ ID NO: 409 - protein, 17 aa, Artificial
  helical interface sequence
RKWQKTGHAVRAIGRLS

SEQ ID NO: 410 - protein, 17 aa, Artificial
  helical interface sequence
FSGCGAAYEAAYWAKLG

SEQ ID NO: 411 - protein, 25 aa, Artificial
  helical interface sequence
NRRMAACLRDGEIILRYVSYALLSG

SEQ ID NO: 412 - protein, 60 aa, Artificial
  helical interface sequence
SRENEMDENLEQVSGIIGNLRHMALDMGNEIDTQNRQIDRIMEKADSNKTRIDEANQRAT

SEQ ID NO: 413 - protein, 13 aa, Artificial
  helical interface sequence
IEDVVAKAEKLAA

SEQ ID NO: 414 - protein, 14 aa, Artificial
  helical interface sequence
TAVERAALFWRWTI

SEQ ID NO: 415 - protein, 27 aa, Artificial
  helical interface sequence
VGTIFAGAFVFQTVFDTAITSWYENHN

SEQ ID NO: 416 - protein, 25 aa, Artificial
  helical interface sequence
QEMTATCLRDLDYYLRLITYGIVAG

SEQ ID NO: 417 - protein, 43 aa, Artificial
  helical interface sequence
KVVILKKATAYILSVQAEEQKLISEEDLLRKRREQLKHKLEQL

SEQ ID NO: 418 - protein, 10 aa, Artificial
  helical interface sequence
KSFLEELLTT

SEQ ID NO: 419 - protein, 23 aa, Artificial
  helical interface sequence
KAVWHKLLSKQRRRAVVACFRMT

SEQ ID NO: 420 - protein, 27 aa, Artificial
  helical interface sequence
LDTFVKQGRELARQQFLVRWHIQRITS

SEQ ID NO: 421 - protein, 15 aa, Artificial
  helical interface sequence
WKLLAKGLLIRERLK

SEQ ID NO: 422 - protein, 22 aa, Artificial
  helical interface sequence
LMEINTSGTFLTQALNHMYKLR

SEQ ID NO: 423 - protein, 17 aa, Artificial
  helical interface sequence
MENLSRRLKVTGDLFDI

SEQ ID NO: 424 - protein, 77 aa, Artificial; identical to SEQ ID NO: 332
  helical interface sequence

SEQ ID NO: 425 - protein, 32 aa, Artificial
  helical interface sequence
DVTRVSLAFWGFDKIDIAQMIQLERGFLAKIV

SEQ ID NO: 426 - protein, 18 aa, Artificial
  helical interface sequence
RREIELSKVIREALESAV

SEQ ID NO: 427 - protein, 8 aa, Artificial
  helical interface sequence
FADYMEAF

SEQ ID NO: 428 - protein, 30 aa, Artificial
  helical interface sequence
AGAPVYLAAVLEYLTAEILELAGNAARDNK

SEQ ID NO: 429 - protein, 27 aa, Artificial
  helical interface sequence
IYEETRGVLKVFLENVIRDAVTYTEHA

SEQ ID NO: 430 - protein, 7 aa, Artificial
  helical interface sequence
LFKLQTL

SEQ ID NO: 431 - protein, 13 aa, Artificial
  helical interface sequence
YAAKLLFQELMAM

SEQ ID NO: 432 - protein, 25 aa, Artificial
  helical interface sequence
PEKINKCYRDIDHYMRLINYSLVVG

SEQ ID NO: 433 - protein, 8 aa, Artificial
  helical interface sequence
IMEMAAEA

SEQ ID NO: 434 - protein, 24 aa, Artificial
  helical interface sequence
ISQAIKYLQNNIKGFIIRQRVNDE

SEQ ID NO: 435 - protein, 42 aa, Artificial
  helical interface sequence
RAQILDKATEYIQYMRRKNHTHQQDIDDLKRQNALLEQQVRA

SEQ ID NO: 436 - protein, 6 aa, Artificial
  helical interface sequence
PKMRNL

SEQ ID NO: 437 - protein, 68 aa, Artificial
  helical interface sequence
QALSEIETRHSEIIKLENSIRELHDMFMDMAMLVESQGEMIDRIEYNVEHAVDYVERAVSDTKKAVKY

SEQ ID NO: 438 - protein, 13 aa, Artificial
  helical interface sequence
QGSRLTAYELVYD

SEQ ID NO: 439 - protein, 13 aa, Artificial
  helical interface sequence
VTVGKFYATFLIQ

SEQ ID NO: 440 - protein, 17 aa, Artificial
  helical interface sequence
IEGAVETAVRAAIAVNE

SEQ ID NO: 441 - protein, 38 aa, Artificial; identical to SEQ ID NO: 235
  helical interface sequence

SEQ ID NO: 442 - protein, 22 aa, Artificial
  helical interface sequence
PEYNISLGERRANAVKMYLQGK

SEQ ID NO: 443 - protein, 35 aa, Artificial
  helical interface sequence
PYVLMGQIATFIYFAYFLIIVPVISTIENVLFYIG

SEQ ID NO: 444 - protein, 22 aa, Artificial
  helical interface sequence
IQAGATANRVALEAMVLARNEG

SEQ ID NO: 445 - protein, 29 aa, Artificial
  helical interface sequence
GLIYEETRGVLKVFLENVIRDAVTYTEHA

SEQ ID NO: 446 - protein, 46 aa, Artificial; identical to SEQ ID NO: 137
  helical interface sequence

SEQ ID NO: 447 - protein, 25 aa, Artificial
  helical interface sequence
VTVGKFYATFLIQEYFRKFKKRKEQ

SEQ ID NO: 448 - protein, 16 aa, Artificial
  helical interface sequence
IWELNTFATCECLAWR

SEQ ID NO: 449 - protein, 16 aa, Artificial
  helical interface sequence
IWELNTFATCECLAWR

SEQ ID NO: 450 - protein, 41 aa, Artificial
  helical interface sequence
LQAGASQFETSAAKLKRKYWWKNLKMMIILGVICAIILIII

SEQ ID NO: 451 - protein, 18 aa, Artificial
  helical interface sequence
EWEHLPYSLMFAGVAELG

SEQ ID NO: 452 - protein, 6 aa, Artificial
  helical interface sequence
CTEELL

SEQ ID NO: 453 - protein, 23 aa, Artificial
  helical interface sequence
ELDQLRQEAEQLKNQIRDARKAC

SEQ ID NO: 454 - protein, 61 aa, Artificial
  helical interface sequence
EEMQRRADQLADESLESTRRMLQLVEESKDAGIRTLVMLDEQGEQLERIEEGMDQINKDMK

SEQ ID NO: 455 - protein, 15 aa, Artificial
  helical interface sequence
QLEEDLKGYLDWITQ

SEQ ID NO: 456 - protein, 20 aa, Artificial
  helical interface sequence
ELEKALNSIIDVYHKYSLIK

SEQ ID NO: 457 - protein, 15 aa, Artificial
  helical interface sequence
LHDLVDYYYFWKEDG

SEQ ID NO: 458 - protein, 21 aa, Artificial
  helical interface sequence
PSRLQAILGDVCHIREQLMSV

SEQ ID NO: 459 - protein, 5 aa, Artificial
  helical interface sequence
QIPTQ

SEQ ID NO: 460 - protein, 16 aa, Artificial
  helical interface sequence
HAVARNFRRAAELIAI

SEQ ID NO: 461 - protein, 27 aa, Artificial
  helical interface sequence
IYEETRGVLKVFLENVIRDAVTYTEHA

SEQ ID NO: 462 - protein, 32 aa, Artificial
  helical interface sequence
LMARKQAGFTAVMFLTVLSVLLYLTNKRLWAG

SEQ ID NO: 463 - protein, 20 aa, Artificial
  helical interface sequence
ILGQVGRQLALIGDDINRRY

SEQ ID NO: 464 - protein, 6 aa, Artificial
  helical interface sequence
FQEFRQ

SEQ ID NO: 465 - protein, 14 aa, Artificial
  helical interface sequence
KRAIRTLWHVQDQM

SEQ ID NO: 466 - protein, 24 aa, Artificial
  helical interface sequence
KQADSIKQMEERNKKRVENFKKTG

SEQ ID NO: 467 - protein, 22 aa, Artificial
  helical interface sequence
LREKQQLEEDLKGYLDWITQAE

SEQ ID NO: 468 - protein, 18 aa, Artificial
  helical interface sequence
ELEKALNSIIDVYHKYSL

SEQ ID NO: 469 - protein, 23 aa, Artificial
  helical interface sequence
RAATARRQHLKSAMLQLAVTEIE

SEQ ID NO: 470 - protein, 61 aa, Artificial
  helical interface sequence
NEMDENLEQVSGIIGNLRHMALDMGNEIDTQNRQIDRIMEKADSNKTRIDEANQRATKMLG

SEQ ID NO: 471 - protein, 18 aa, Artificial
  helical interface sequence
QGVLQATFEYQTMIAELA

SEQ ID NO: 472 - protein, 16 aa, Artificial
  helical interface sequence
DFEILEMAVRELAIEK

SEQ ID NO: 473 - protein, 29 aa, Artificial
  helical interface sequence
VGAPVYMAAVLEYLTAEILELAVNAARDN

SEQ ID NO: 474 - protein, 16 aa, Artificial
  helical interface sequence
KATFRAITSTLASSFK

SEQ ID NO: 475 - protein, 9 aa, Artificial
  helical interface sequence
YRGRYFLFT

SEQ ID NO: 476 - protein, 15 aa, Artificial
  helical interface sequence
WKLLAKGLLIRERLK

SEQ ID NO: 477 - protein, 13 aa, Artificial
  helical interface sequence
IAFQAQCRGYLAR

SEQ ID NO: 478 - protein, 20 aa, Artificial
  helical interface sequence
WRDRFLFVAEAIYKAQAETG

SEQ ID NO: 479 - protein, 59 aa, Artificial
  helical interface sequence
QQLDENYGHVSTELRRRIVTLKQRVATQVNRIKALQNSIQEQVVEMKRLEVDIDIKIRA

SEQ ID NO: 480 - protein, 42 aa, Artificial; identical to SEQ ID NO: 435
  helical interface sequence

SEQ ID NO: 481 - protein, 11 aa, Artificial
  helical interface sequence
VDDVLKFTFTG

SEQ ID NO: 482 - protein, 28 aa, Artificial
  helical interface sequence
IYEETRGVLKVFLENVIRDAVTYTEHAK

SEQ ID NO: 483 - protein, 21 aa, Artificial
  helical interface sequence
KKLLAYLKYIPEVSRSLATFL

SEQ ID NO: 484 - protein, 12 aa, Artificial
  helical interface sequence
NERFRAPEALFH

SEQ ID NO: 485 - protein, 11 aa, Artificial
  helical interface sequence
EEAIAEAKEIM

SEQ ID NO: 486 - protein, 38 aa, Artificial; identical to SEQ ID NO: 214
  helical interface sequence

SEQ ID NO: 487 - protein, 20 aa, Artificial
  helical interface sequence
AEVVEWVHRIFDQRTKFGFQ

SEQ ID NO: 488 - protein, 19 aa, Artificial
  helical interface sequence
LERDVSRAVELLERLQRSG

SEQ ID NO: 489 - protein, 22 aa, Artificial
  helical interface sequence
EMERGLFQTGQKGLNDFQCWEK

SEQ ID NO: 490 - protein, 55 aa, Artificial; identical to SEQ ID NO: 129
  helical interface sequence

SEQ ID NO: 491 - protein, 16 aa, Artificial
  helical interface sequence
TMENLSRRLKVTGDLF

SEQ ID NO: 492 - protein, 23 aa, Artificial
  helical interface sequence
MFSSNRQKILERTETLNQEWKQR

SEQ ID NO: 493 - protein, 24 aa, Artificial
  helical interface sequence
YFIFKDLVTVFLFMLILALFVFYS

SEQ ID NO: 494 - protein, 52 aa, Artificial; identical to SEQ ID NO: 329
  helical interface sequence

SEQ ID NO: 495 - protein, 44 aa, Artificial
  helical interface sequence
KVVILKKATAYILSVQAEEQKLISEEDLLRKRREQLKHKLEQLG

SEQ ID NO: 496 - protein, 20 aa, Artificial
  helical interface sequence
LLQAAKGLAGAVSELLRSAQ

SEQ ID NO: 497 - protein, 68 aa, Artificial
  helical interface sequence
EVVLKKLKKSLNVAKSEFDRDAAMQRKLEKMADQAMTQMYKQARSEDKRAKVTSAMQTMLFTMLRKLD

SEQ ID NO: 498 - protein, 16 aa, Artificial
  helical interface sequence
DFEILEMAVRELAIEK

SEQ ID NO: 499 - protein, 52 aa, Artificial
  helical interface sequence
RRIENLNKKMEDGFLDVWTYNAELLVLMENERTLDFHDSNVKNLYDKVRLQL

SEQ ID NO: 500 - protein, 8 aa, Artificial
  helical interface sequence
PLHLAAYW

SEQ ID NO: 501 - protein, 61 aa, Artificial
  helical interface sequence
LGQALEVVIQLQEKHVKDEQIEHWKKIVKTQEELKELLNKMVNLKEKIKELHQQYKEASEV

SEQ ID NO: 502 - protein, 14 aa, Artificial
  helical interface sequence
GNKRLDVVNKITNN

SEQ ID NO: 503 - protein, 28 aa, Artificial
  helical interface sequence
EWKTVVGAAMFFIGFTALLLIWEKHYVY

SEQ ID NO: 504 - protein, 23 aa, Artificial
  helical interface sequence
EGNTYFWHAFWFAIGVAWIGYWS

SEQ ID NO: 505 - protein, 45 aa, Artificial; identical to SEQ ID NO: 156
  helical interface sequence

SEQ ID NO: 506 - protein, 29 aa, Artificial
  helical interface sequence
SKAMSIMNSFVNDVFERIAGEASRLAHYN

SEQ ID NO: 507 - protein, 39 aa, Artificial
  helical interface sequence
PIHLLELCDQKLMEFLCNMDNKDLVWLEEIQEEAERMFT

SEQ ID NO: 508 - protein, 27 aa, Artificial
  helical interface sequence
VGTIFAGAFVFQTVFDTAITSWYENHN

SEQ ID NO: 509 - protein, 38 aa, Artificial; identical to SEQ ID NO: 214
  helical interface sequence

SEQ ID NO: 510 - protein, 26 aa, Artificial
  helical interface sequence
AAVYSAAILEYLTAEVLELAGNASKD

SEQ ID NO: 511 - protein, 12 aa, Artificial
  helical interface sequence
PLTEAIAAADSQ

SEQ ID NO: 512 - protein, 24 aa, Artificial
  helical interface sequence
KQADSIKQMEERNKKRVENFKKTG

SEQ ID NO: 513 - protein, 22 aa, Artificial
  helical interface sequence
PQGGLQNIAAEKHNLGILTKRS

SEQ ID NO: 514 - protein, 59 aa, Artificial; identical to SEQ ID NO: 479
  helical interface sequence

SEQ ID NO: 515 - protein, 17 aa, Artificial
  helical interface sequence
PFEQRHIVDGFSFELSK

SEQ ID NO: 516 - protein, 20 aa, Artificial
  helical interface sequence
PEFQGHVVRVMGGLDILINA

SEQ ID NO: 517 - protein, 23 aa, Artificial
  helical interface sequence
FYLQSKVYRAAERLKWELAQREK

SEQ ID NO: 518 - protein, 8 aa, Artificial
  helical interface sequence
QDYISGAY

SEQ ID NO: 519 - protein, 62 aa, Artificial
  helical interface sequence
ARENEMDENLEQVSGIIGNLRHMALDMGNEIDTQNRQIDRIMEKADSNKTRIDEANQRATKM

SEQ ID NO: 520 - protein, 46 aa, Artificial; identical to SEQ ID NO: 375
  helical interface sequence

SEQ ID NO: 521 - protein, 26 aa, Artificial
  helical interface sequence
YKKLQDQRIGLSVIQRNIRKWLVLRN

SEQ ID NO: 522 - protein, 9 aa, Artificial
  helical interface sequence
IADIQGYNY

SEQ ID NO: 523 - protein, 20 aa, Artificial
  helical interface sequence
KIETLRLAKNYIWALSEILR

SEQ ID NO: 524 - protein, 20 aa, Artificial
  helical interface sequence
FKEFMYEWIIGQFERSLIDL

SEQ ID NO: 525 - protein, 26 aa, Artificial
  helical interface sequence
PEKRKLIQQQLVLLLHAHKCQRREQA

SEQ ID NO: 526 - protein, 13 aa, Artificial
  helical interface sequence
QGSRLTAYELVYD

SEQ ID NO: 527 - protein, 15 aa, Artificial
  helical interface sequence
SLEKQKGVTNLLIKY

SEQ ID NO: 528 - protein, 14 aa, Artificial
  helical interface sequence
ISKVLLSICSLLCD

SEQ ID NO: 529 - protein, 41 aa, Artificial
  helical interface sequence
NDEAESFRNTWLLFRSFQQWITLTQTFKEQSRLADQAFLNK

SEQ ID NO: 530 - protein, 23 aa, Artificial
  helical interface sequence
LMEINTSGTFLTQALNHMYKLRT

SEQ ID NO: 531 - protein, 23 aa, Artificial
  helical interface sequence
FYLQSKVYRAAERLKWELAQREK

SEQ ID NO: 532 - protein, 50 aa, Artificial; identical to SEQ ID NO: 225
  helical interface sequence

SEQ ID NO: 533 - protein, 58 aa, Artificial
  helical interface sequence
LELVSGSIGVLKNMSQRIGGELEEQAVMLEDFSHELESTQSRLDNVMKKLAKVSHMTS

SEQ ID NO: 534 - protein, 29 aa, Artificial
  helical interface sequence
SKAMSIMNSFVNDIFERIAAEASRLAHYN

SEQ ID NO: 535 - protein, 21 aa, Artificial
  helical interface sequence
SGTMENLSRRLKVTGDLFDIM

SEQ ID NO: 536 - protein, 13 aa, Artificial
  helical interface sequence
YAFKLLIQELMSM

SEQ ID NO: 537 - protein, 32 aa, Artificial; identical to SEQ ID NO: 462
  helical interface sequence

SEQ ID NO: 538 - protein, 29 aa, Artificial
  helical interface sequence
GLWTFIALHGAFGLIGFMLRQFEIARLVG

SEQ ID NO: 539 - protein, 12 aa, Artificial
  helical interface sequence
LDALWDCLTGWV

SEQ ID NO: 540 - protein, 45 aa, Artificial
  helical interface sequence
NIHEMEIQLKDALEKNQQWLVYDQQREVYVKGLLAKIFELEKKTE

SEQ ID NO: 541 - protein, 14 aa, Artificial
  helical interface sequence
IGIVAAQSVGEPGT

SEQ ID NO: 542 - protein, 8 aa, Artificial
  helical interface sequence
YDEFLEFM

SEQ ID NO: 543 - protein, 100 aa, Artificial; identical to SEQ ID NO: 113
  helical interface sequence

SEQ ID NO: 544 - protein, 5 aa, Artificial
  helical interface sequence
STFQQ

SEQ ID NO: 545 - protein, 29 aa, Artificial
  helical interface sequence
SKAMGIMNSFVNDIFERIASEASRLAHYN

SEQ ID NO: 546 - protein, 9 aa, Artificial
  helical interface sequence
YRGRYFLFT

SEQ ID NO: 547 - protein, 31 aa, Artificial
  helical interface sequence
SSWFKIFLFYLIFYGCLAGIFIGTIQVLLLT

SEQ ID NO: 548 - protein, 6 aa, Artificial
  helical interface sequence
RKDLYA

SEQ ID NO: 549 - protein, 52 aa, Artificial; identical to SEQ ID NO: 329
  helical interface sequence

SEQ ID NO: 550 - protein, 29 aa, Artificial
  helical interface sequence
AGAPVYLAAVLEYLTAEILELAGNAARDN

SEQ ID NO: 551 - protein, 20 aa, Artificial
  helical interface sequence
AEVVEWVHRIFDQRTKFGFQ

SEQ ID NO: 552 - protein, 31 aa, Artificial
  helical interface sequence
DVTRVSLAFWGFDKIDIAQMIQLERGFLAKI

SEQ ID NO: 553 - protein, 9 aa, Artificial
  helical interface sequence
EKELFESYI

SEQ ID NO: 554 - protein, 29 aa, Artificial
  helical interface sequence
AGAPVYLAAVLEYLTAEILELAGNAARDN

SEQ ID NO: 555 - protein, 53 aa, Artificial; identical to SEQ ID NO: 171
  helical interface sequence

SEQ ID NO: 556 - protein, 46 aa, Artificial
  helical interface sequence
RRIENLNKKVDDGFLDIWTYNAELLVLLENERTLDFHDSNVRNLYE

SEQ ID NO: 557 - protein, 68 aa, Artificial; identical to SEQ ID NO: 437
  helical interface sequence

SEQ ID NO: 558 - protein, 18 aa, Artificial
  helical interface sequence
ELEKALNSIIDVYHKYSL

SEQ ID NO: 559 - protein, 16 aa, Artificial
  helical interface sequence
IWELNTFATCECLAWR

SEQ ID NO: 560 - protein, 14 aa, Artificial
  helical interface sequence
EKELDERTEVFLKK

SEQ ID NO: 561 - protein, 24 aa, Artificial
  helical interface sequence
YFIFKDLVTVFLFMLILALFVFYS

SEQ ID NO: 562 - protein, 19 aa, Artificial
  helical interface sequence
KVTAMNCFLLELQVILHEY

SEQ ID NO: 563 - protein, 11 aa, Artificial
  helical interface sequence
KRWLHFFMLFV

SEQ ID NO: 564 - protein, 67 aa, Artificial
  helical interface sequence
LAEVQARHQELLKLEKSMAELTQLFNDMEELVIEQQENVDVIDKNVEDAQLDVEQGVGHTDKAVKSA

SEQ ID NO: 565 - protein, 12 aa, Artificial
  helical interface sequence
SEWEKLVRDAMT

SEQ ID NO: 566 - protein, 29 aa, Artificial
  helical interface sequence
SSAVMALQEASEAYLVGLFEDTNLCAIHA

SEQ ID NO: 567 - protein, 30 aa, Artificial
  helical interface sequence
SDEFDASISQVNEKINQSLAFIRKSDELLH

SEQ ID NO: 568 - protein, 38 aa, Artificial
  helical interface sequence
ASRKLQLKTLLLQIAKQELEREAEERRGEKGRALSTRA

SEQ ID NO: 569 - protein, 50 aa, Artificial
  helical interface sequence
VDEVVDIMRVNVDKVLERDQKLSELDDRADALQAGASQFETSAAKLKRKY

SEQ ID NO: 570 - protein, 29 aa, Artificial
  helical interface sequence
AGAPVYLAAVLEYLTAEILELAGNAARDN

SEQ ID NO: 571 - protein, 35 aa, Artificial; identical to SEQ ID NO: 319
  helical interface sequence

SEQ ID NO: 572 - protein, 12 aa, Artificial
  helical interface sequence
PETLHNVMWAMS

SEQ ID NO: 573 - protein, 10 aa, Artificial
  helical interface sequence
GRPDAEYWNS

SEQ ID NO: 574 - protein, 16 aa, Artificial
  helical interface sequence
DFEILEMAVRELAIEK

SEQ ID NO: 575 - protein, 29 aa, Artificial
  helical interface sequence
AKRTSRFLSGIINFIHFREACRETYMEFL

SEQ ID NO: 576 - protein, 9 aa, Artificial
  helical interface sequence
KTEFLSRLR

SEQ ID NO: 577 - protein, 18 aa, Artificial
  helical interface sequence
IKDYMLDRINGVYGADAK

SEQ ID NO: 578 - protein, 47 aa, Artificial; identical to SEQ ID NO: 136
  helical interface sequence

SEQ ID NO: 579 - protein, 14 aa, Artificial
  helical interface sequence
ELTLVRHYTGLSRR

SEQ ID NO: 580 - protein, 16 aa, Artificial
  helical interface sequence
ARRKLKGAILTTMLAT

SEQ ID NO: 581 - protein, 36 aa, Artificial
  helical interface sequence
VPYVLMGQIATFIYFAYFLIIVPVISTIENVLFYIG

SEQ ID NO: 582 - protein, 25 aa, Artificial
  helical interface sequence
PEKINKCYRDIDHYMRLINYSLVVG

SEQ ID NO: 583 - protein, 48 aa, Artificial
  helical interface sequence
EEEDEVWQVIIGARAEMTSKHQEYLKLETTWMTAVGLSEMAAEAAYQT

SEQ ID NO: 584 - protein, 32 aa, Artificial
  helical interface sequence
VKQLEAEVEELESEIWHLENEVARLEKENAEC

SEQ ID NO: 585 - protein, 22 aa, Artificial
  helical interface sequence
PRMNNLSYWLYVAGTSLAVASL

SEQ ID NO: 586 - protein, 10 aa, Artificial
  helical interface sequence
GAELRHVLAT

SEQ ID NO: 587 - protein, 61 aa, Artificial; identical to SEQ ID NO: 470
  helical interface sequence

SEQ ID NO: 588 - protein, 46 aa, Artificial
  helical interface sequence
EDKLRDKAKELWDWLYQLQTEKYDFAEQIKRKKYEIVTLRNRIDQA

SEQ ID NO: 589 - protein, 11 aa, Artificial
  helical interface sequence
KPAIRRLARRG

SEQ ID NO: 590 - protein, 11 aa, Artificial
  helical interface sequence
KPAIRRLARRG

SEQ ID NO: 591 - protein, 16 aa, Artificial
  helical interface sequence
IWELNTFATCECLAWR

SEQ ID NO: 592 - protein, 27 aa, Artificial
  helical interface sequence
IYEETRGVLKVFLENVIRDAVTYTEHA

SEQ ID NO: 593 - protein, 11 aa, Artificial
  helical interface sequence
VDDVLKFTFTG

SEQ ID NO: 594 - protein, 16 aa, Artificial
  helical interface sequence
DDEMEEERRLAYVGIT

SEQ ID NO: 595 - protein, 32 aa, Artificial; identical to SEQ ID NO: 462
  helical interface sequence

SEQ ID NO: 596 - protein, 18 aa, Artificial
  helical interface sequence
IYAAMMIMEYYRQSKAKK

SEQ ID NO: 597 - protein, 11 aa, Artificial
  helical interface sequence
KPAIRRLARRG

SEQ ID NO: 598 - protein, 29 aa, Artificial
  helical interface sequence
PKDALKNACNSIINKLGALKTNFETEWNL

SEQ ID NO: 599 - protein, 55 aa, Artificial
  helical interface sequence
QNKTAATRYRQKKRAEQEALTGECKELEKKNEALKERADSLAKEIQYLKDLIEEV

SEQ ID NO: 600 - protein, 21 aa, Artificial
  helical interface sequence
HKELAEHLMLVDLARNDLARI

SEQ ID NO: 601 - protein, 47 aa, Artificial; identical to SEQ ID NO: 136
  helical interface sequence

SEQ ID NO: 602 - protein, 33 aa, Artificial
  helical interface sequence
VKQLKAKVEELKSKLWHLKNKVARLKKKNAECK

SEQ ID NO: 603 - protein, 29 aa, Artificial
  helical interface sequence
SSAVMALQEASEAYLVALFEDTNLCAIHA

SEQ ID NO: 604 - protein, 15 aa, Artificial
  helical interface sequence
SLEKQKGVTNLLIKY

SEQ ID NO: 605 - protein, 50 aa, Artificial
  helical interface sequence
KRIENLNNKVDDGFLDIWTYNAELLVLLENERTLDFHDSNVKNLYEKVRS

SEQ ID NO: 606 - protein, 63 aa, Artificial
  helical interface sequence
RRLQQTQAQVDEVVDIMRVNVDKVLERDQKLSELDDRADALQAGASQFETSAAKLKRKYWWKN

SEQ ID NO: 607 - protein, 29 aa, Artificial
  helical interface sequence
IVSQTRNKELLDKKIRSEIEAIKKIIAEF

SEQ ID NO: 608 - protein, 23 aa, Artificial
  helical interface sequence
EGNTYFWHAFWFAIGVAWIGYWS

SEQ ID NO: 609 - protein, 24 aa, Artificial
  helical interface sequence
KQVESRKGEEERNANRAEHFKKTG

SEQ ID NO: 610 - protein, 26 aa, Artificial
  helical interface sequence
LDTFVKQGRELARQQFLVRWHIQRIT

SEQ ID NO: 611 - protein, 58 aa, Artificial; identical to SEQ ID NO: 533
  helical interface sequence

SEQ ID NO: 612 - protein, 24 aa, Artificial
  helical interface sequence
YFIIKDVFALAVVLLVFFAIVGFM

SEQ ID NO: 613 - protein, 16 aa, Artificial
  helical interface sequence
PSWYLFQFHRLLQYAR

SEQ ID NO: 614 - protein, 31 aa, Artificial
  helical interface sequence
GRAIYNNMKQFIRYLISSNVGEVVCIFLTAA

SEQ ID NO: 615 - protein, 29 aa, Artificial
  helical interface sequence
KVKQLADKVEELLSKNYHLANEVARLAKL

SEQ ID NO: 616 - protein, 76 aa, Artificial; identical to SEQ ID NO: 362
  helical interface sequence

SEQ ID NO: 617 - protein, 14 aa, Artificial
  helical interface sequence
PAQAFLLFKQFLKG

SEQ ID NO: 618 - protein, 9 aa, Artificial
  helical interface sequence
RPDAENWNS

SEQ ID NO: 619 - protein, 44 aa, Artificial
  helical interface sequence
ETRHSEIIKLENSIRELHDMFMDMAMLVESQGEMIDRIEYNVEH

SEQ ID NO: 620 - protein, 9 aa, Artificial
  helical interface sequence
KDLLEQRRA

SEQ ID NO: 621 - protein, 24 aa, Artificial
  helical interface sequence
YFIFKDLVTVFLFMLILALFVFYS

SEQ ID NO: 622 - protein, 37 aa, Artificial
  helical interface sequence
NMQLQQLTLLQHNIKTQVSQILRVEVDIDVALRACKG

SEQ ID NO: 623 - protein, 35 aa, Artificial; identical to SEQ ID NO: 319
  helical interface sequence

SEQ ID NO: 624 - protein, 26 aa, Artificial
  helical interface sequence
PEGLRCFYYLVQDLKCLVFSLIGLHF

SEQ ID NO: 625 - protein, 12 aa, Artificial
  helical interface sequence
PTFLLQFKDKLN

SEQ ID NO: 626 - protein, 14 aa, Artificial
  helical interface sequence
KLPFQRLVREIAQD

SEQ ID NO: 627 - protein, 29 aa, Artificial
  helical interface sequence
VGAPVYMAAVLEYLTAEILELAVNAARDN

SEQ ID NO: 628 - protein, 27 aa, Artificial
  helical interface sequence
IYEETRGVLKVFLENVIRDAVTYTEHA

SEQ ID NO: 629 - protein, 24 aa, Artificial
  helical interface sequence
VDYLNELRESCLEAYTGIVQGLKG

SEQ ID NO: 630 - protein, 12 aa, Artificial
  helical interface sequence
FILREKITHFDH

SEQ ID NO: 631 - protein, 18 aa, Artificial
  helical interface sequence
MDDLLIRRLTDRNDKEAH

SEQ ID NO: 632 - protein, 32 aa, Artificial; identical to SEQ ID NO: 462
  helical interface sequence

SEQ ID NO: 633 - protein, 21 aa, Artificial
  helical interface sequence
EWAREIGAQLRRIADDLNAQY

SEQ ID NO: 634 - protein, 29 aa, Artificial
  helical interface sequence
PEFEEQEAIMKVLQRDAALKRAEEERVRH

SEQ ID NO: 635 - protein, 53 aa, Artificial
  helical interface sequence
RRIENLNKKMEDGFLDVWTYNAELLVLMENERTLDFHDSNVKNLYDKVRLQLR

SEQ ID NO: 636 - protein, 24 aa, Artificial
  helical interface sequence
KQADSIKQMEERNKKRVENFKKTG

SEQ ID NO: 637 - protein, 13 aa, Artificial
  helical interface sequence
FKEVANAVKISAS

SEQ ID NO: 638 - protein, 12 aa, Artificial
  helical interface sequence
PMQTWYKKYCFD

SEQ ID NO: 639 - protein, 15 aa, Artificial
  helical interface sequence
FDFTHREFRKLWSEG

SEQ ID NO: 640 - protein, 18 aa, Artificial
  helical interface sequence
QGVLQATFEYQTMIAELA

SEQ ID NO: 641 - protein, 29 aa, Artificial
  helical interface sequence
RFAKLLLRLPALRSIGLKCLEHLFFFKLI

SEQ ID NO: 642 - protein, 6 aa, Artificial
  helical interface sequence
RAMMVT

SEQ ID NO: 643 - protein, 8 aa, Artificial
  helical interface sequence
ESEWRNLG

SEQ ID NO: 644 - protein, 17 aa, Artificial
  helical interface sequence
NAIELARVVDRSLRDSK

SEQ ID NO: 645 - protein, 11 aa, Artificial
  helical interface sequence
WSKKNELFSNL

SEQ ID NO: 646 - protein, 83 aa, Artificial; identical to SEQ ID NO: 106
  helical interface sequence

SEQ ID NO: 647 - protein, 16 aa, Artificial
  helical interface sequence
IWELNTFATCECLAWR

SEQ ID NO: 648 - protein, 29 aa, Artificial
  helical interface sequence
SSAVMALQEASEAYLVALFEDTNLCAIHA

SEQ ID NO: 649 - protein, 5 aa, Artificial
  helical interface sequence
LYFTM

SEQ ID NO: 650 - protein, 22 aa, Artificial
  helical interface sequence
RKEYEKIEEILDIGLAKAMEET

SEQ ID NO: 651 - protein, 35 aa, Artificial
  helical interface sequence
DQRKRMGLKMLLISALLTSLLYYMKRHKWSVLKSR

SEQ ID NO: 652 - protein, 9 aa, Artificial
  helical interface sequence
PFEVAQLGS

SEQ ID NO: 653 - protein, 27 aa, Artificial
  helical interface sequence
IYEETRGVLKVFLENVIRDAVTYTEHA

SEQ ID NO: 654 - protein, 13 aa, Artificial
  helical interface sequence
QEWVELMVEAKEA

SEQ ID NO: 655 - protein, 8 aa, Artificial
  helical interface sequence
FEELRTFG

SEQ ID NO: 656 - protein, 27 aa, Artificial
  helical interface sequence
NTELQVVNGRYNRATSSLEAAKALTAN

SEQ ID NO: 657 - protein, 66 aa, Artificial
  helical interface sequence
LSEIETRHSEIIKLENSIRELHDMFMDMAMLVESQGEMIDRIEYNVEHAVDYVERAVSDTKKAVKY

SEQ ID NO: 658 - protein, 29 aa, Artificial
  helical interface sequence
PKDALKNACNSIINKLGALKTNFETEWNL

SEQ ID NO: 659 - protein, 18 aa, Artificial
  helical interface sequence
QSFWEARAKALESLLIEK

SEQ ID NO: 660 - protein, 9 aa, Artificial
  helical interface sequence
YCRHNYGVV

SEQ ID NO: 661 - protein, 18 aa, Artificial
  helical interface sequence
MDDLLIRRLTDRNDKEAH

SEQ ID NO: 662 - protein, 22 aa, Artificial
  helical interface sequence
TKEFADNLDSDFKVRQYLTKEL

SEQ ID NO: 663 - protein, 36 aa, Artificial; identical to SEQ ID NO: 581
  helical interface sequence

SEQ ID NO: 664 - protein, 30 aa, Artificial
  helical interface sequence
DGLNQLYNLVAQDYALTDTIECLSRMLHRG

SEQ ID NO: 665 - protein, 32 aa, Artificial; identical to SEQ ID NO: 462
  helical interface sequence

SEQ ID NO: 666 - protein, 20 aa, Artificial
  helical interface sequence
GTMENLSRRLKVTGDLFDIM

SEQ ID NO: 667 - protein, 22 aa, Artificial
  helical interface sequence
YPEYVSIQREKDAGAYSVKAAL

SEQ ID NO: 668 - protein, 27 aa, Artificial
  helical interface sequence
AAVPVIISRALELFLESLLKKACQVTQ

SEQ ID NO: 669 - protein, 22 aa, Artificial
  helical interface sequence
VEEFFHLQHYLDTATAPRLFDK

SEQ ID NO: 670 - protein, 9 aa, Artificial
  helical interface sequence
LEELRKQRG

SEQ ID NO: 671 - protein, 25 aa, Artificial
  helical interface sequence
VDQVVVRGIDTLQKKVASILLALTQ

SEQ ID NO: 672 - protein, 14 aa, Artificial
  helical interface sequence
KRELIESKWHRLLF

SEQ ID NO: 673 - protein, 24 aa, Artificial
  helical interface sequence
YYTIKDILGALLLILALMLLVLFA

SEQ ID NO: 674 - protein, 15 aa, Artificial
  helical interface sequence
LEEDLRGYMSWITQG

SEQ ID NO: 675 - protein, 83 aa, Artificial; identical to SEQ ID NO: 106
  helical interface sequence

SEQ ID NO: 676 - protein, 29 aa, Artificial
  helical interface sequence
SKAMSIMNSFVNDVFERIAGEASRLAHYN

SEQ ID NO: 677 - protein, 23 aa, Artificial
  helical interface sequence
TGLDALISGWARVEQIKAAKAST

SEQ ID NO: 678 - protein, 10 aa, Artificial
  helical interface sequence
DEQIFYLRSR

SEQ ID NO: 679 - protein, 57 aa, Artificial
  helical interface sequence
AELQAEIDDTVGIMRDNINKVAERGERLTSIEDKADNLAVSAQGFKRGANRVRKAMW

SEQ ID NO: 680 - protein, 29 aa, Artificial
  helical interface sequence
GLIYEETRGVLKVFLENVIRDAVTYTEHA

SEQ ID NO: 681 - protein, 6 aa, Artificial
  helical interface sequence
PIEVIW

SEQ ID NO: 682 - protein, 28 aa, Artificial
  helical interface sequence
KWRLLAMMTLFFGSGFAAPFFIVRHQLL

SEQ ID NO: 683 - protein, 28 aa, Artificial
  helical interface sequence
KWRLLAMMTLFFGSGFAAPFFIVRHQLL

SEQ ID NO: 684 - protein, 5 aa, Artificial
  helical interface sequence
PGRTL

SEQ ID NO: 685 - protein, 5 aa, Artificial
  helical interface sequence
LRYRS

SEQ ID NO: 686 - protein, 34 aa, Artificial
  helical interface sequence
AATLAQEAGNFERISGDLKTQIDQVESTAGSLQG

SEQ ID NO: 687 - protein, 6 aa, Artificial
  helical interface sequence
FWQFFS

SEQ ID NO: 688 - protein, 29 aa, Artificial
  helical interface sequence
SKAMSIMNSFVNDVFERIAGEASRLAHYN

SEQ ID NO: 689 - protein, 11 aa, Artificial
  helical interface sequence
WKLLAKGLLIR

SEQ ID NO: 690 - protein, 15 aa, Artificial
  helical interface sequence
LFEGFKATVSIIQQR

SEQ ID NO: 691 - protein, 7 aa, Artificial
  helical interface sequence
ALEVAEK

SEQ ID NO: 692 - protein, 20 aa, Artificial
  helical interface sequence
DEDFIQALDKMMLENLQQRS

SEQ ID NO: 693 - protein, 57 aa, Artificial; identical to SEQ ID NO: 679
  helical interface sequence

SEQ ID NO: 694 - protein, 28 aa, Artificial
  helical interface sequence
SQEEQCLSNCVNRFLDTNIRIVNGLQNT

SEQ ID NO: 695 - protein, 44 aa, Artificial
  helical interface sequence
TLFALVRTALRIKTEGNLEQANEELRAIIKKIWKRTSMKLLDQV

SEQ ID NO: 696 - protein, 19 aa, Artificial
  helical interface sequence
LRYLFHCLQMSSAYVQQMA

SEQ ID NO: 697 - protein, 35 aa, Artificial
  helical interface sequence
PQEFFFHAMGGREGLIDTAVKTAETGYIQRRLVKA

SEQ ID NO: 698 - protein, 8 aa, Artificial
  helical interface sequence
DPIVNTLA

SEQ ID NO: 699 - protein, 10 aa, Artificial
  helical interface sequence
AVFNSINYLN

SEQ ID NO: 700 - protein, 17 aa, Artificial
  helical interface sequence
VSSTLLYYNDLIEFETG

SEQ ID NO: 701 - protein, 34 aa, Artificial
  helical interface sequence
VKQLEAEVEEIESEVWHLENEVARLEKENAECEA

SEQ ID NO: 702 - protein, 30 aa, Artificial
  helical interface sequence
LTQQSYFMMATMVIAVPTGIKIFSWIATMW

SEQ ID NO: 703 - protein, 35 aa, Artificial
  helical interface sequence
HKAHKAILAYEKGWLAFSLAMLFVFIALIAYTLAT

SEQ ID NO: 704 - protein, 12 aa, Artificial
  helical interface sequence
PETLHNVMWAMS

SEQ ID NO: 705 - protein, 41 aa, Artificial
  helical interface sequence
SMQELQELSKKLHAKIDSVDEERYDTEVKLQKTNKELEDLS

SEQ ID NO: 706 - protein, 29 aa, Artificial
  helical interface sequence
SKAMSIMNSFVNDVFERIAGEASRLAHYN

SEQ ID NO: 707 - protein, 16 aa, Artificial
  helical interface sequence
DFEILEMAVRELAIEK

SEQ ID NO: 708 - protein, 38 aa, Artificial
  helical interface sequence
LIPTIKFRHCSLLRNRRCTVAYLYDRLLRIRALRWEYG

SEQ ID NO: 709 - protein, 32 aa, Artificial; identical to SEQ ID NO: 462
  helical interface sequence

SEQ ID NO: 710 - protein, 21 aa, Artificial
  helical interface sequence
WEKYQLLAETMHLSYADRASY

SEQ ID NO: 711 - protein, 60 aa, Artificial
  helical interface sequence
SRTAELQAEIDDTVGIMRDNINKVAERGERLTSIEDKADNLAVSAQGFKRGANRVRKAMW

SEQ ID NO: 712 - protein, 29 aa, Artificial
  helical interface sequence
VKQLVDKVEELLSKNYHLVNEVARLVKLV

SEQ ID NO: 713 - protein, 27 aa, Artificial
  helical interface sequence
IYEETRGVLKVFLENVIRDAVTYTEHA

SEQ ID NO: 714 - protein, 18 aa, Artificial
  helical interface sequence
ELEKALNSIIDVYHKYSL

SEQ ID NO: 715 - protein, 29 aa, Artificial
  helical interface sequence
SSAVMALQEASEAYLVALFEDTNLCAIHA

SEQ ID NO: 716 - protein, 35 aa, Artificial
  helical interface sequence
RDEVKQAIELAKKGALQIYEMQREAILRRYIEVGE

SEQ ID NO: 717 - protein, 9 aa, Artificial
  helical interface sequence
WAQWFETQH

SEQ ID NO: 718 - protein, 16 aa, Artificial
  helical interface sequence
DFEILEMAVRELAIEK

SEQ ID NO: 719 - protein, 20 aa, Artificial
  helical interface sequence
IISLMQMGKTSVSLKRHSDA

SEQ ID NO: 720 - protein, 32 aa, Artificial; identical to SEQ ID NO: 462
  helical interface sequence

SEQ ID NO: 721 - protein, 19 aa, Artificial
  helical interface sequence
EFAAQLRKIGDKVYCTWSA

SEQ ID NO: 722 - protein, 27 aa, Artificial
  helical interface sequence
QVVEGTQAILLFTLAFMVILGLYDTVF

SEQ ID NO: 723 - protein, 29 aa, Artificial
  helical interface sequence
VKQLVDKVEELLSKNYHLVNEVARLVKLV

SEQ ID NO: 724 - protein, 18 aa, Artificial
  helical interface sequence
EWEHLPYSLMFAGVAELG

SEQ ID NO: 725 - protein, 27 aa, Artificial
  helical interface sequence
FHPYYSFKDILGLTLMLTPFLTLALFS

SEQ ID NO: 726 - protein, 20 aa, Artificial
  helical interface sequence
AEVVEWVHRIFDQRTKFGFQ

SEQ ID NO: 727 - protein, 10 aa, Artificial
  helical interface sequence
QWGERMWLAE

SEQ ID NO: 728 - protein, 19 aa, Artificial
  helical interface sequence
KQEESIKAMDARNAKRIAN

SEQ ID NO: 729 - protein, 37 aa, Artificial
  helical interface sequence
DVQTAKEFIKIIENAENEYQTAISENYQTMSDTTFKA

SEQ ID NO: 730 - protein, 25 aa, Artificial
  helical interface sequence
HIANIGRLVEDMENKIRSTLNEIYF

SEQ ID NO: 731 - protein, 16 aa, Artificial
  helical interface sequence
KLPFQRLVREIAQDFK

SEQ ID NO: 732 - protein, 20 aa, Artificial
  helical interface sequence
GDAPAILFDKEFCEWMIQQI

SEQ ID NO: 733 - protein, 6 aa, Artificial
  helical interface sequence
NEDVFA

SEQ ID NO: 734 - protein, 23 aa, Artificial
  helical interface sequence
FYLQSKVYRAAERLKWELAQREK

SEQ ID NO: 735 - protein, 17 aa, Artificial
  helical interface sequence
TLAVPTIFFLGAIAAMQ

SEQ ID NO: 736 - protein, 16 aa, Artificial
  helical interface sequence
IYAAMMIMEYYRQSKA

SEQ ID NO: 737 - protein, 36 aa, Artificial
  helical interface sequence
EHDERKRLGLKTVIILSSLYLLSIWVKKFKWAGIKT

SEQ ID NO: 738 - protein, 20 aa, Artificial
  helical interface sequence
AEVVEWVHRIFDQRTKFGFQ

SEQ ID NO: 739 - protein, 19 aa, Artificial
  helical interface sequence
KQEESIKAMDARNAKRIAN

SEQ ID NO: 740 - protein, 29 aa, Artificial
  helical interface sequence
SKAMSIMNSFVNDVFERIAGEASRLAHYN

SEQ ID NO: 741 - protein, 20 aa, Artificial
  helical interface sequence
WAAQRYGRELRRMSDEFEGS

SEQ ID NO: 742 - protein, 16 aa, Artificial
  helical interface sequence
IWELNTFATCECLAWR

SEQ ID NO: 743 - protein, 20 aa, Artificial
  helical interface sequence
IISLMQMGKTSVSLKRHSDA

SEQ ID NO: 744 - protein, 16 aa, Artificial
  helical interface sequence
WKLLAKGLLIRERLKR

SEQ ID NO: 745 - protein, 16 aa, Artificial
  helical interface sequence
LKKFRERLLEIVKSEE

SEQ ID NO: 746 - protein, 16 aa, Artificial
  helical interface sequence
LFQGFKSYLPIAELAI

SEQ ID NO: 747 - protein, 14 aa, Artificial
  helical interface sequence
RIKLRDQQRLERTG

SEQ ID NO: 748 - protein, 14 aa, Artificial
  helical interface sequence
RIKLRDQQRLERTG

SEQ ID NO: 749 - protein, 31 aa, Artificial
  helical interface sequence
WDRKIEEYTKKIEELIKKSQEQQEKNEKELK

SEQ ID NO: 750 - protein, 68 aa, Artificial
  helical interface sequence
LAEVQARHQELLKLEKSMAELTQLFNDMEELVIEQQENVDVIDKNVEDAQLDVEQGVGHTDKAVKSAR

SEQ ID NO: 751 - protein, 29 aa, Artificial
  helical interface sequence
SSAVMALQEASEAYLVALFEDTNLCAIHA

SEQ ID NO: 752 - protein, 11 aa, Artificial
  helical interface sequence
KPAIRRLARRG

SEQ ID NO: 753 - protein, 15 aa, Artificial
  helical interface sequence
IYTVRELCDIADKYS

SEQ ID NO: 754 - protein, 20 aa, Artificial
  helical interface sequence
EELLQVVQRIHELRTLAGYR

SEQ ID NO: 755 - protein, 29 aa, Artificial
  helical interface sequence
PAELSKQGESLAVMDARNEWRVWNMKKTG

SEQ ID NO: 756 - protein, 16 aa, Artificial
  helical interface sequence
APSAFYGYGWAQARSH

SEQ ID NO: 757 - protein, 15 aa, Artificial
  helical interface sequence
DEIINFYMNMLMERS

SEQ ID NO: 758 - protein, 32 aa, Artificial; identical to SEQ ID NO: 462
  helical interface sequence

SEQ ID NO: 759 - protein, 22 aa, Artificial
  helical interface sequence
SKNIHIAAEAMRQAYADRSVYM

SEQ ID NO: 760 - protein, 25 aa, Artificial
  helical interface sequence
EEWAREIGAQLRRIADDLNAQYERR

SEQ ID NO: 761 - protein, 17 aa, Artificial
  helical interface sequence
MENLSRRLKVTGDLFDI

SEQ ID NO: 762 - protein, 35 aa, Artificial
  helical interface sequence
PVATQIHWLDGFILVIIAAITIFVTLLILYAVWRF

SEQ ID NO: 763 - protein, 20 aa, Artificial
  helical interface sequence
SVGTSVASAEQDELSQRLAR

SEQ ID NO: 764 - protein, 27 aa, Artificial
  helical interface sequence
PEGLRVFYYLVQDLKCLVFSLIGLHFK

SEQ ID NO: 765 - protein, 30 aa, Artificial
  helical interface sequence
PKDALKNACNSIINKLGALKTNFETEWNLQ

SEQ ID NO: 766 - protein, 19 aa, Artificial
  helical interface sequence
YLKAQKVRRLITNDFLKAF

SEQ ID NO: 767 - protein, 14 aa, Artificial
  helical interface sequence
LPYSLMFAGVAELG

SEQ ID NO: 768 - protein, 35 aa, Artificial
  helical interface sequence
DHRKRMGLKMLLMMGLLVPLVYYMKRHKWSVLKSR

SEQ ID NO: 769 - protein, 15 aa, Artificial
  helical interface sequence
AEETRRMLHRAFDTL

SEQ ID NO: 770 - protein, 25 aa, Artificial
  helical interface sequence
SRRMAACLRDMEIVLRYVSYAMIAG

SEQ ID NO: 771 - protein, 31 aa, Artificial; identical to SEQ ID NO: 552
  helical interface sequence

SEQ ID NO: 772 - protein, 10 aa, Artificial
  helical interface sequence
QWGERMWLAE

SEQ ID NO: 773 - protein, 16 aa, Artificial
  helical interface sequence
APSAFYGYGWAQARSH

SEQ ID NO: 774 - protein, 19 aa, Artificial
  helical interface sequence
SQLVEELLKIICAFQLDTG

SEQ ID NO: 775 - protein, 25 aa, Artificial
  helical interface sequence
QEKINKCYRDIDHYMRLINYTLVVG

SEQ ID NO: 776 - protein, 11 aa, Artificial
  helical interface sequence
RYVAADAIELV

SEQ ID NO: 777 - protein, 50 aa, Artificial; identical to SEQ ID NO: 605
  helical interface sequence

SEQ ID NO: 778 - protein, 46 aa, Artificial; identical to SEQ ID NO: 556
  helical interface sequence

SEQ ID NO: 779 - protein, 19 aa, Artificial
  helical interface sequence
QGVLQATFEYQTMIAELAG

SEQ ID NO: 780 - protein, 6 aa, Artificial
  helical interface sequence
FWQFFS

SEQ ID NO: 781 - protein, 16 aa, Artificial
  helical interface sequence
PANARRLMDSIDSLKS

SEQ ID NO: 782 - protein, 12 aa, Artificial
  helical interface sequence
AWWKLFAKARPL

SEQ ID NO: 783 - protein, 7 aa, Artificial
  helical interface sequence
ELDRALG

SEQ ID NO: 784 - protein, 26 aa, Artificial
  helical interface sequence
YYDAYYKKSQKVRTLIKNDFDKVFEN

SEQ ID NO: 785 - protein, 9 aa, Artificial
  helical interface sequence
VIQRNIRKW

SEQ ID NO: 786 - protein, 22 aa, Artificial
  helical interface sequence
PQGGLQNIATGKHNLGVLTKRS

SEQ ID NO: 787 - protein, 23 aa, Artificial
  helical interface sequence
MNEFTTHILEVINAHMVLSKANS

SEQ ID NO: 788 - protein, 19 aa, Artificial
  helical interface sequence
KIETLRLAKNYIWALSEIL

SEQ ID NO: 789 - protein, 9 aa, Artificial
  helical interface sequence
CIIALFFFA

SEQ ID NO: 790 - protein, 29 aa, Artificial
  helical interface sequence
KSQFLYVLIPAGIYWYWWKNGNEYNEFLY

SEQ ID NO: 791 - protein, 9 aa, Artificial
  helical interface sequence
FAEYWNLLS

SEQ ID NO: 792 - protein, 11 aa, Artificial
  helical interface sequence
QGLRELMEKQL

SEQ ID NO: 793 - protein, 15 aa, Artificial
  helical interface sequence
YSSWHYRSCLLPQLH

SEQ ID NO: 794 - protein, 15 aa, Artificial
  helical interface sequence
EIDNLALLTALKDKY

SEQ ID NO: 795 - protein, 8 aa, Artificial
  helical interface sequence
KVASHINE

SEQ ID NO: 796 - protein, 32 aa, Artificial
  helical interface sequence
PKWNETMKVVSNFLEVGEYNAIAATGMLWDSA

SEQ ID NO: 797 - protein, 31 aa, Artificial
  helical interface sequence
AEQKNGYLAQVLDEIRHTHQCAYVNYYFAKN

SEQ ID NO: 798 - protein, 24 aa, Artificial
  helical interface sequence
KQADSIKQMEERNKKRVENFKKTG

SEQ ID NO: 799 - protein, 27 aa, Artificial
  helical interface sequence
PEGLRCFYYLVQDLKCLVFSLIGLHFK

SEQ ID NO: 800 - protein, 21 aa, Artificial
  helical interface sequence
AKTVEDAVKEMLEHMASTLAQ

SEQ ID NO: 801 - protein, 14 aa, Artificial
  helical interface sequence
TAAERAALFWRWTM

SEQ ID NO: 802 - protein, 14 aa, Artificial
  helical interface sequence
SSIRYLQEIYNSNN

SEQ ID NO: 803 - protein, 29 aa, Artificial
  helical interface sequence
SSAVMALQEACEAYLVGLFEDTNLCAIHA

SEQ ID NO: 804 - protein, 18 aa, Artificial
  helical interface sequence
ELEKALNSIIDVYHKYSL

SEQ ID NO: 805 - protein, 16 aa, Artificial
  helical interface sequence
KWKQSVRLISLCQRLS

SEQ ID NO: 806 - protein, 29 aa, Artificial
  helical interface sequence
SSAVMALQEASEAYLVALFEDTNLCAIHA

SEQ ID NO: 807 - protein, 11 aa, Artificial
  helical interface sequence
KPAIRRLARRG

SEQ ID NO: 808 - protein, 29 aa, Artificial
  helical interface sequence
AGAPVYLAAVLEYLTAEILELAGNWERDN

SEQ ID NO: 809 - protein, 14 aa, Artificial
  helical interface sequence
PTFLERRKSQVAEL

SEQ ID NO: 810 - protein, 16 aa, Artificial
  helical interface sequence
IWELNTFATCECLAWR

SEQ ID NO: 811 - protein, 29 aa, Artificial
  helical interface sequence
DGLNQLYNLVAQDYALTDTIEALSRMLHR

SEQ ID NO: 812 - protein, 18 aa, Artificial
  helical interface sequence
ENAIELARVVDRSLRDSK

SEQ ID NO: 813 - protein, 29 aa, Artificial
  helical interface sequence
SSAVMALQEASEAYLVGLFEDTNLCAIHA

SEQ ID NO: 814 - protein, 11 aa, Artificial
  helical interface sequence
KPAIRRLARRG

SEQ ID NO: 815 - protein, 68 aa, Artificial; identical to SEQ ID NO: 750
  helical interface sequence

SEQ ID NO: 816 - protein, 67 aa, Artificial; identical to SEQ ID NO: 564
  helical interface sequence

SEQ ID NO: 817 - protein, 68 aa, Artificial
  helical interface sequence
SIKFTKQSSVASTRNTLKMAQDAERAGMNTLGMLGHQSEQLNNVEGNLDLMKVQNKVADEKVAELKKL

SEQ ID NO: 818 - protein, 32 aa, Artificial
  helical interface sequence
VKQLVDKVEELLSKNYHLVNEVARLVKLVGER

SEQ ID NO: 819 - protein, 20 aa, Artificial
  helical interface sequence
EELLQVVQRIHELRTLAGYR

SEQ ID NO: 820 - protein, 26 aa, Artificial
  helical interface sequence
AAVYSAAILEYLTAEVLELAGNASKD

SEQ ID NO: 821 - protein, 29 aa, Artificial
  helical interface sequence
GLWLIASFFMFVAVWSWWGRTYLRAQALG

SEQ ID NO: 822 - protein, 15 aa, Artificial
  helical interface sequence
EHIQLLNLLVKISQL

SEQ ID NO: 823 - protein, 17 aa, Artificial
  helical interface sequence
VEEFFHLQHYLDTATAP

SEQ ID NO: 824 - protein, 8 aa, Artificial
  helical interface sequence
IKPIQRVL

SEQ ID NO: 825 - protein, 32 aa, Artificial
  helical interface sequence
SDEFDASISQVNEKINQSLAFIRKSDELLHNV

SEQ ID NO: 826 - protein, 14 aa, Artificial
  helical interface sequence
PAQAFLLFKQFLKG

SEQ ID NO: 827 - protein, 11 aa, Artificial
  helical interface sequence
YGTWHHRCWLL

SEQ ID NO: 828 - protein, 14 aa, Artificial
  helical interface sequence
TAVERAALFWRWTI

SEQ ID NO: 829 - protein, 19 aa, Artificial
  helical interface sequence
EAVFLRGVDIYTRLLPALA

SEQ ID NO: 830 - protein, 18 aa, Artificial
  helical interface sequence
ELEKALNSIIDVYHKYSL

SEQ ID NO: 831 - protein, 6 aa, Artificial
  helical interface sequence
PIARAW

SEQ ID NO: 832 - protein, 24 aa, Artificial
  helical interface sequence
YFIIKDVFALAVVLLVFFAIVGFM

SEQ ID NO: 833 - protein, 23 aa, Artificial
  helical interface sequence
FYLQSKVYRAAERLKWELAQREK

SEQ ID NO: 834 - protein, 23 aa, Artificial
  helical interface sequence
FYLQSKVYRAAERLKWELAQREK

SEQ ID NO: 835 - protein, 13 aa, Artificial
  helical interface sequence
LFEGFKATVSIIQ

SEQ ID NO: 836 - protein, 40 aa, Artificial
  helical interface sequence
GFLDVWTYNAELLVLMENERTLDFHDSNVKNLYDKVRLQL

SEQ ID NO: 837 - protein, 29 aa, Artificial
  helical interface sequence
SSAVMALQEASEAYLVALFEDTNLCAIHA

SEQ ID NO: 838 - protein, 29 aa, Artificial
  helical interface sequence
GLIYEETRGVLKVFLENVIRDAVTYTEHA

SEQ ID NO: 839 - protein, 56 aa, Artificial
  helical interface sequence
KRMRNRIAASKSRKRKLERIARLEEKVKTLKAQNSELASTANMLREQVAQLKQKVM

SEQ ID NO: 840 - protein, 63 aa, Artificial; identical to SEQ ID NO: 606
  helical interface sequence

SEQ ID NO: 841 - protein, 14 aa, Artificial
  helical interface sequence
VSKCCEEFRDYVEE

SEQ ID NO: 842 - protein, 20 aa, Artificial
  helical interface sequence
WRDRFLFVAEAIYKAQAETG

SEQ ID NO: 843 - protein, 5 aa, Artificial
  helical interface sequence
YRGLR

SEQ ID NO: 844 - protein, 21 aa, Artificial
  helical interface sequence
DRKVAMGFLAATILIVVMAMS

SEQ ID NO: 845 - protein, 11 aa, Artificial
  helical interface sequence
KPAIRRLARRG

SEQ ID NO: 846 - protein, 16 aa, Artificial
  helical interface sequence
DFEILEMAVRELAIEK

SEQ ID NO: 847 - protein, 16 aa, Artificial
  helical interface sequence
DFEILEMAVRELAIEK

SEQ ID NO: 848 - protein, 33 aa, Artificial
  helical interface sequence
EKVQHIQLLQKNVRAQLVDMKRLEVDIDIKIRS

SEQ ID NO: 849 - protein, 23 aa, Artificial
  helical interface sequence
FYLQSKVYRAAERLKWELAQREK

SEQ ID NO: 850 - protein, 13 aa, Artificial
  helical interface sequence
FAKLKEKFFNEIN

SEQ ID NO: 851 - protein, 63 aa, Artificial
  helical interface sequence
RETAIQQLEADILDVNQIFKDLAMMIHDQGDLIDSIEANVESSEVHVERASDQLQRAAYYQKK

SEQ ID NO: 852 - protein, 31 aa, Artificial
  helical interface sequence
LKVSIHQMEMERIRYVLSSYLRCRLMKIEKF

SEQ ID NO: 853 - protein, 24 aa, Artificial
  helical interface sequence
YFIIKDVFALAVVLLVFFAIVGFM

SEQ ID NO: 854 - protein, 10 aa, Artificial
  helical interface sequence
PENILSAYQG

SEQ ID NO: 855 - protein, 20 aa, Artificial
  helical interface sequence
GSVGTSVASAEQDELSQRLA

SEQ ID NO: 856 - protein, 8 aa, Artificial
  helical interface sequence
FAEYWNLL

SEQ ID NO: 857 - protein, 10 aa, Artificial
  helical interface sequence
VRSYNCLKRA

SEQ ID NO: 858 - protein, 13 aa, Artificial
  helical interface sequence
KDLKNTMQYLTNF

SEQ ID NO: 859 - protein, 15 aa, Artificial
  helical interface sequence
VSDRAWALFRALDGK

SEQ ID NO: 860 - protein, 27 aa, Artificial
  helical interface sequence
PELETWVETWAFSETIHSRSFTHIIRN

SEQ ID NO: 861 - protein, 16 aa, Artificial
  helical interface sequence
TYSLFYGYGYAVAQDR

SEQ ID NO: 862 - protein, 6 aa, Artificial
  helical interface sequence
RKEYVS

SEQ ID NO: 863 - protein, 11 aa, Artificial
  helical interface sequence
KPAIRRLARRG

SEQ ID NO: 864 - protein, 31 aa, Artificial; identical to SEQ ID NO: 797
  helical interface sequence

SEQ ID NO: 865 - protein, 9 aa, Artificial
  helical interface sequence
KILHRLLQD

SEQ ID NO: 866 - protein, 64 aa, Artificial
  helical interface sequence
LQQTQAQVDEVVDIMRVNVDKVLERDQKLSELDDRADALQAGASQFETSAAKLKRKYWWKNLKM

SEQ ID NO: 867 - protein, 29 aa, Artificial
  helical interface sequence
SSAVMALQEASEAYLVALFEDTNLCAIHA

SEQ ID NO: 868 - protein, 29 aa, Artificial
  helical interface sequence
SSAVMALQEASEAYLVALFEDTNLCAIHA

SEQ ID NO: 869 - protein, 29 aa, Artificial
  helical interface sequence
LARVHYHRTLKAIVYLQCCYRRMMAKREL

SEQ ID NO: 870 - protein, 16 aa, Artificial
  helical interface sequence
IWELNTFATCECLAWR

SEQ ID NO: 871 - protein, 12 aa, Artificial
  helical interface sequence
KRILQAANEVIE

SEQ ID NO: 872 - protein, 18 aa, Artificial
  helical interface sequence
PAELIERLEQAWMNEKFA

SEQ ID NO: 873 - protein, 39 aa, Artificial; identical to SEQ ID NO: 507
  helical interface sequence

SEQ ID NO: 874 - protein, 19 aa, Artificial
  helical interface sequence
IGHQELILEAVDLLCALNY

SEQ ID NO: 875 - protein, 30 aa, Artificial; identical to SEQ ID NO: 366
  helical interface sequence

SEQ ID NO: 876 - protein, 35 aa, Artificial; identical to SEQ ID NO: 762
  helical interface sequence

SEQ ID NO: 877 - protein, 28 aa, Artificial
  helical interface sequence
SMEAERVRVFHKQAFEYISIALRIDEDE

SEQ ID NO: 878 - protein, 41 aa, Artificial
  helical interface sequence
VLKRKVIEKVQHIQLLQKNVRAQLVDMKRLEVDIDIKIRSC

SEQ ID NO: 879 - protein, 13 aa, Artificial
  helical interface sequence
LAFSSVAHTCRNV

SEQ ID NO: 880 - protein, 11 aa, Artificial
  helical interface sequence
KPAIRRLARRG

SEQ ID NO: 881 - protein, 22 aa, Artificial
  helical interface sequence
VVSYVSHATQQRLQNLVEKISE

SEQ ID NO: 882 - protein, 16 aa, Artificial
  helical interface sequence
EWEKVAFAMFPATFRA

SEQ ID NO: 883 - protein, 23 aa, Artificial
  helical interface sequence
DEFKTTIQHFRHTALQAAINKTV

SEQ ID NO: 884 - protein, 27 aa, Artificial
  helical interface sequence
YFVVNVIIPCLLFSFLTGLVFYLPTDS

SEQ ID NO: 885 - protein, 14 aa, Artificial
  helical interface sequence
KTGHAVRAIGRLSS

SEQ ID NO: 886 - protein, 7 aa, Artificial
  helical interface sequence
MFPKILM

SEQ ID NO: 887 - protein, 7 aa, Artificial
  helical interface sequence
WYDFLME

SEQ ID NO: 888 - protein, 8 aa, Artificial
  helical interface sequence
IEELGEIL

SEQ ID NO: 889 - protein, 29 aa, Artificial
  helical interface sequence
SSAVMALQEASEAYLVALFEDTNLCAIHA

SEQ ID NO: 890 - protein, 19 aa, Artificial
  helical interface sequence
PVLSKLCVPVANQFINLAG

SEQ ID NO: 891 - protein, 29 aa, Artificial
  helical interface sequence
SKAMSIMNSFVNDIFERIAAEASRLAHYN

SEQ ID NO: 892 - protein, 68 aa, Artificial; identical to SEQ ID NO: 817
  helical interface sequence

SEQ ID NO: 893 - protein, 29 aa, Artificial
  helical interface sequence
SSAVMALQEASEAYLVALFEDTNLCAIHA

SEQ ID NO: 894 - protein, 8 aa, Artificial
  helical interface sequence
FAEYWNLL

SEQ ID NO: 895 - protein, 32 aa, Artificial
  helical interface sequence
STISNCCILQTADSLRWLTHTAYRTHELSLTY

SEQ ID NO: 896 - protein, 18 aa, Artificial
  helical interface sequence
EEEIEVFQKQLSDILDFI

SEQ ID NO: 897 - protein, 35 aa, Artificial; identical to SEQ ID NO: 697
  helical interface sequence

SEQ ID NO: 898 - protein, 25 aa, Artificial
  helical interface sequence
ADMTATCLRDLDYYLRLITYGIVAG

SEQ ID NO: 899 - protein, 39 aa, Artificial; identical to SEQ ID NO: 244
  helical interface sequence

SEQ ID NO: 900 - protein, 16 aa, Artificial
  helical interface sequence
ARRKLKGAILTTMLAT

SEQ ID NO: 901 - protein, 27 aa, Artificial
  helical interface sequence
GCRMKGLIDEVDQDFTSRINKLRDSLF

SEQ ID NO: 902 - protein, 27 aa, Artificial
  helical interface sequence
TCGIADFLNNYQTSVDKDLRTLEGILY

SEQ ID NO: 903 - protein, 27 aa, Artificial
  helical interface sequence
IYEETRGVLKVFLENVIRDAVTYTEHA

SEQ ID NO: 904 - protein, 31 aa, Artificial; identical to SEQ ID NO: 797
  helical interface sequence

SEQ ID NO: 905 - protein, 15 aa, Artificial
  helical interface sequence
KEIKDILAYLRVIAN

SEQ ID NO: 906 - protein, 15 aa, Artificial
  helical interface sequence
IDELWLCTLLAVIGE

SEQ ID NO: 907 - protein, 29 aa, Artificial
  helical interface sequence
SSAVMALQEACEAYLVGLFEDTNLCAIHA

SEQ ID NO: 908 - protein, 29 aa, Artificial
  helical interface sequence
TLLMIGLTTNMLTMYQWWRDVIRESTFQG

SEQ ID NO: 909 - protein, 19 aa, Artificial
  helical interface sequence
TLDEAERQWKAEFHRWSSY

SEQ ID NO: 910 - protein, 25 aa, Artificial
  helical interface sequence
LEGLKKAAALAVLNARYLKELLKEK

SEQ ID NO: 911 - protein, 35 aa, Artificial
  helical interface sequence
RLEGLTQDLRQLQESEQQLDHLMNICTTQLRLLSE

SEQ ID NO: 912 - protein, 28 aa, Artificial
  helical interface sequence
SCVEACNFIAKSTKEQNDSGSENENWVL

SEQ ID NO: 913 - protein, 16 aa, Artificial
  helical interface sequence
DFEILEMAVRELAIEK

SEQ ID NO: 914 - protein, 16 aa, Artificial
  helical interface sequence
DFEILEMAVRELAIEK

SEQ ID NO: 915 - protein, 29 aa, Artificial
  helical interface sequence
AGAPVYLAAVLEYLTAEILELAGNAARDN

SEQ ID NO: 916 - protein, 29 aa, Artificial
  helical interface sequence
PGHMSSVSFLFVNAMALGLHGGLILSVAN

SEQ ID NO: 917 - protein, 22 aa, Artificial
  helical interface sequence
MNEFTTHILEVINAHMVLSKAN

SEQ ID NO: 918 - protein, 6 aa, Artificial
  helical interface sequence
WLDYFA

SEQ ID NO: 919 - protein, 19 aa, Artificial
  helical interface sequence
FYDWIKEFVRDQGEFIAQQ

SEQ ID NO: 920 - protein, 12 aa, Artificial
  helical interface sequence
AFSKAVVSADQK

SEQ ID NO: 921 - protein, 31 aa, Artificial; identical to SEQ ID NO: 749
  helical interface sequence

SEQ ID NO: 922 - protein, 15 aa, Artificial
  helical interface sequence
SLDLEMIELENFVLH

SEQ ID NO: 923 - protein, 19 aa, Artificial
  helical interface sequence
NSMERVEWLRKKLQDVHNF

SEQ ID NO: 924 - protein, 22 aa, Artificial
  helical interface sequence
YLEQKMFAAMVADNQMAMVMLN

SEQ ID NO: 925 - protein, 7 aa, Artificial
  helical interface sequence
AWDLYGE

SEQ ID NO: 926 - protein, 18 aa, Artificial
  helical interface sequence
EEEIEVFQKQLSDILDFI

SEQ ID NO: 927 - protein, 18 aa, Artificial
  helical interface sequence
EEEIEVFQKQLSDILDFI

SEQ ID NO: 928 - protein, 61 aa, Artificial
  helical interface sequence
ADQLADESLESTRRMLQLVEESKDAGIRTLVMLDEQGEQLDRVEEGMNHINQDMKEAEKNL

SEQ ID NO: 929 - protein, 51 aa, Artificial
  helical interface sequence
RIQDLEKYVEDTKIDLWSYNAELLVALENQHTIDLTDSEMNKLFEKTRRQL

SEQ ID NO: 930 - protein, 31 aa, Artificial
  helical interface sequence
SDEFDASISQVNEKINQSLAFIRKSDELLHN

SEQ ID NO: 931 - protein, 32 aa, Artificial
  helical interface sequence
MQVVRYSLLIHAAAGIILIHAILIHMYMAFWV

SEQ ID NO: 932 - protein, 23 aa, Artificial
  helical interface sequence
VLSKFFFFIFVFNFVLLGQIGAC

SEQ ID NO: 933 - protein, 10 aa, Artificial
  helical interface sequence
KKWIQKVIDQ

SEQ ID NO: 934 - protein, 6 aa, Artificial
  helical interface sequence
WYDFLM

SEQ ID NO: 935 - protein, 37 aa, Artificial
  helical interface sequence
LIPTIKFRHCSLLRNRRCTVAYLYDRLLRIRALRWEY

SEQ ID NO: 936 - protein, 52 aa, Artificial; identical to SEQ ID NO: 499
  helical interface sequence

SEQ ID NO: 937 - protein, 14 aa, Artificial
  helical interface sequence
LTVSRARKIQRFLS

SEQ ID NO: 938 - protein, 57 aa, Artificial
  helical interface sequence
RLEAGYQIAVETEQIGQEMLENLSHDRERIQRARERLRETDANLGKSSRILTGMLRR

SEQ ID NO: 939 - protein, 20 aa, Artificial
  helical interface sequence
AEVQIARKLQCIADQFHRLH

SEQ ID NO: 940 - protein, 32 aa, Artificial; identical to SEQ ID NO: 895
  helical interface sequence

SEQ ID NO: 941 - protein, 15 aa, Artificial
  helical interface sequence
RSFRLLDELERGQKG

SEQ ID NO: 942 - protein, 16 aa, Artificial
  helical interface sequence
REAVGFHFDLFLDELN

SEQ ID NO: 943 - protein, 15 aa, Artificial
  helical interface sequence
ADEWESLQETLYWLA

SEQ ID NO: 944 - protein, 12 aa, Artificial
  helical interface sequence
GEYRRRWKREVL

SEQ ID NO: 945 - protein, 12 aa, Artificial
  helical interface sequence
LVNWVQQTLAAN

SEQ ID NO: 946 - protein, 11 aa, Artificial
  helical interface sequence
VNWVQQTLAAN

SEQ ID NO: 947 - protein, 22 aa, Artificial
  helical interface sequence
LEVVKDIATESTLYGIETYEKF

SEQ ID NO: 948 - protein, 22 aa, Artificial
  helical interface sequence
AADCQFWETWLGSQCRLHELRE

SEQ ID NO: 949 - protein, 12 aa, Artificial
  helical interface sequence
EKALMKAVATVG

SEQ ID NO: 950 - protein, 12 aa, Artificial
  helical interface sequence
FTVFLTMFGEKL

SEQ ID NO: 951 - protein, 18 aa, Artificial
  helical interface sequence
PEMQKTWESYHLIRDSMR

SEQ ID NO: 952 - protein, 65 aa, Artificial; identical to SEQ ID NO: 381
  helical interface sequence

SEQ ID NO: 953 - protein, 25 aa, Artificial
  helical interface sequence
LEGLKKAAALAVLNARYLKELLKEK

SEQ ID NO: 954 - protein, 6 aa, Artificial
  helical interface sequence
WYDFLM

SEQ ID NO: 955 - protein, 6 aa, Artificial
  helical interface sequence
FSDLWK

SEQ ID NO: 956 - protein, 27 aa, Artificial
  helical interface sequence
GLIYEETRGVLKVFLENVIRDAVTYTE

SEQ ID NO: 957 - protein, 11 aa, Artificial
  helical interface sequence
KPAIRRLARRG

SEQ ID NO: 958 - protein, 12 aa, Artificial
  helical interface sequence
AQDYISGAYLLT

SEQ ID NO: 959 - protein, 7 aa, Artificial
  helical interface sequence
AFDIISG

SEQ ID NO: 960 - protein, 29 aa, Artificial
  helical interface sequence
PEFEEQEAIMKVLQRDAALKRAEEERVRH

SEQ ID NO: 961 - protein, 23 aa, Artificial
  helical interface sequence
ILENLRSKIQKLESDVSAQMEYC

SEQ ID NO: 962 - protein, 30 aa, Artificial
  helical interface sequence
SIRYLQEIYNSNNQKIVNLKEKVAQLEAQC

SEQ ID NO: 963 - protein, 15 aa, Artificial
  helical interface sequence
LHDLVDYYYFWKEDG

SEQ ID NO: 964 - protein, 13 aa, Artificial
  helical interface sequence
YVEGWKKTFEEDF

SEQ ID NO: 965 - protein, 23 aa, Artificial
  helical interface sequence
TEELFDFLHARDHCVAHKLFNSL

SEQ ID NO: 966 - protein, 19 aa, Artificial
  helical interface sequence
LECLRLLNEIIADFDDLLS

SEQ ID NO: 967 - protein, 43 aa, Artificial
  helical interface sequence
LEIENARSEALLGELGIIRALLVGNISIGLQESLWELASEITN

SEQ ID NO: 968 - protein, 25 aa, Artificial
  helical interface sequence
SRRMAACLRDMEIILRYVTYAVFAG

SEQ ID NO: 969 - protein, 22 aa, Artificial
  helical interface sequence
AQGALANIAVNKANLDVMKERS

SEQ ID NO: 970 - protein, 56 aa, Artificial
  helical interface sequence
IEQLTQKSKKIIEEIIRYENTILAHENTIQQLTDMHIMNSNKITQLKQKIAQLESH

SEQ ID NO: 971 - protein, 14 aa, Artificial
  helical interface sequence
PPSISSVLTILYYG

SEQ ID NO: 972 - protein, 9 aa, Artificial
  helical interface sequence
NECMESVRN

SEQ ID NO: 973 - protein, 23 aa, Artificial
  helical interface sequence
ATDVTTLNEMFRYKTNLYKLKEE

SEQ ID NO: 974 - protein, 22 aa, Artificial
  helical interface sequence
PLSQCLFWALVADLLTLTWIGG

SEQ ID NO: 975 - protein, 22 aa, Artificial
  helical interface sequence
YNSLNIYASAAFDGAGTCEDSF

SEQ ID NO: 976 - protein, 43 aa, Artificial
  helical interface sequence
KKRRAATARRQHLKSAMLQLAVTEIEKEAAAKEVEKQNYLAEH

SEQ ID NO: 977 - protein, 27 aa, Artificial
  helical interface sequence
IYEETRGVLKVFLENVIRDAVTYTEHA

SEQ ID NO: 978 - protein, 17 aa, Artificial
  helical interface sequence
ERLAKLNQLLRIEEELG

SEQ ID NO: 979 - protein, 14 aa, Artificial
  helical interface sequence
AEDHRVWKDYVHTL

SEQ ID NO: 980 - protein, 27 aa, Artificial
  helical interface sequence
IYEETRGVLKVFLENVIRDAVTYTEHA

SEQ ID NO: 981 - protein, 12 aa, Artificial
  helical interface sequence
PDHEDTFFRDLV

SEQ ID NO: 982 - protein, 8 aa, Artificial
  helical interface sequence
WLPFARAA

SEQ ID NO: 983 - protein, 11 aa, Artificial
  helical interface sequence
KPAIRRLARRG

SEQ ID NO: 984 - protein, 21 aa, Artificial
  helical interface sequence
SGTMENLSRRLKVTGDLFDIM

SEQ ID NO: 985 - protein, 25 aa, Artificial
  helical interface sequence
LGDSNSGMHLMIGILAALEIRHKTG

SEQ ID NO: 986 - protein, 26 aa, Artificial
  helical interface sequence
KKEKKKIAIERIDTLFTLAERVARYS

SEQ ID NO: 987 - protein, 9 aa, Artificial
  helical interface sequence
FEHYWAQLT

SEQ ID NO: 988 - protein, 32 aa, Artificial; identical to SEQ ID NO: 895
  helical interface sequence

SEQ ID NO: 989 - protein, 13 aa, Artificial
  helical interface sequence
GEYRRRWKREVLG

SEQ ID NO: 990 - protein, 32 aa, Artificial
  helical interface sequence
EKIVVLLQRLKPEIKDVIEQLNLVTTWLQLQI

SEQ ID NO: 991 - protein, 9 aa, Artificial
  helical interface sequence
EDNFVNFFK

SEQ ID NO: 992 - protein, 28 aa, Artificial
  helical interface sequence
GWWLIAGLFLTLSILLWWVRTYKRAEAL

SEQ ID NO: 993 - protein, 25 aa, Artificial
  helical interface sequence
SRRMAACLRDMEIILRYVTYAVFAG

SEQ ID NO: 994 - protein, 22 aa, Artificial
  helical interface sequence
AQGALANIAVNKANLDVMKERS

SEQ ID NO: 995 - protein, 28 aa, Artificial
  helical interface sequence
PEFLEQKRAEVDTVCRHNYEIFDNFLVP

SEQ ID NO: 996 - protein, 13 aa, Artificial
  helical interface sequence
LDTLILVKAMGHR

SEQ ID NO: 997 - protein, 23 aa, Artificial
  helical interface sequence
FIFKDLVTVFLFMLILALFVFYS

SEQ ID NO: 998 - protein, 27 aa, Artificial
  helical interface sequence
VGTIFAGAFVFQTVFDTAITSWYENHN

SEQ ID NO: 999 - protein, 25 aa, Artificial
  helical interface sequence
HAPYVKDKAEEWRYTDRFLQGYSAD

SEQ ID NO: 1000 - protein, 42 aa, Artificial
  helical interface sequence
EVKIRIESTVAGSLRSMKSVLEHLRAKMQRMEEAIKTQKELC

SEQ ID NO: 1001 - protein, 29 aa, Artificial
  helical interface sequence
PQVAARKILDALEYRTWKLGVHKEVAERY

SEQ ID NO: 1002 - protein, 48 aa, Artificial
  helical interface sequence
LVEESKDAGIRTLVMLDEQGEQLDRVEEGMNHINQDMKEAEKNLKDLG

SEQ ID NO: 1003 - protein, 14 aa, Artificial
  helical interface sequence
VSKCCEEFRDYVEE

SEQ ID NO: 1004 - protein, 25 aa, Artificial
  helical interface sequence
PKEQAIGLSVTFLSFLLPAGWVLYH

SEQ ID NO: 1005 - protein, 13 aa, Artificial
  helical interface sequence
ELTLVRHYTGLSR

SEQ ID NO: 1006 - protein, 12 aa, Artificial
  helical interface sequence
PETLHNVMWAMS

SEQ ID NO: 1007 - protein, 16 aa, Artificial
  helical interface sequence
KTTLTAAITTVLAKTY

SEQ ID NO: 1008 - protein, 9 aa, Artificial
  helical interface sequence
REWFKDMLS

SEQ ID NO: 1009 - protein, 32 aa, Artificial; identical to SEQ ID NO: 462
  helical interface sequence

SEQ ID NO: 1010 - protein, 19 aa, Artificial
  helical interface sequence
EAAFAELFQHFAPKVKGFL

SEQ ID NO: 1011 - protein, 30 aa, Artificial
  helical interface sequence
KVKQLEDVVEELLSVNYHLENVVARLKKLV

SEQ ID NO: 1012 - protein, 19 aa, Artificial
  helical interface sequence
TELFTLTYGSIVAQLCQDY

SEQ ID NO: 1013 - protein, 77 aa, Artificial; identical to SEQ ID NO: 332
  helical interface sequence

SEQ ID NO: 1014 - protein, 32 aa, Artificial; identical to SEQ ID NO: 315
  helical interface sequence

SEQ ID NO: 1015 - protein, 32 aa, Artificial; identical to SEQ ID NO: 315
  helical interface sequence

SEQ ID NO: 1016 - protein, 8 aa, Artificial
  helical interface sequence
IKPIQRVL

SEQ ID NO: 1017 - protein, 22 aa, Artificial
  helical interface sequence
AADCQFWETWLGSQCRLHELRE

SEQ ID NO: 1018 - protein, 37 aa, Artificial
  helical interface sequence
SRKLQLKTLLLQIAKQELEREAEERRGEKGRALSTRA

SEQ ID NO: 1019 - protein, 22 aa, Artificial
  helical interface sequence
AQGALANIAVDKANLDVMKERS

SEQ ID NO: 1020 - protein, 32 aa, Artificial
  helical interface sequence
PRWGETMKVISNFLEVGEYNAIAASAMLWDSA

SEQ ID NO: 1021 - protein, 31 aa, Artificial; identical to SEQ ID NO: 797
  helical interface sequence

SEQ ID NO: 1022 - protein, 6 aa, Artificial
  helical interface sequence
LRVLRS

SEQ ID NO: 1023 - protein, 16 aa, Artificial
  helical interface sequence
APSAFYGYGWAQARSH

SEQ ID NO: 1024 - protein, 28 aa, Artificial
  helical interface sequence
EWKTVVGAAMFFIGFTALLLIWEKHYVY

SEQ ID NO: 1025 - protein, 20 aa, Artificial
  helical interface sequence
FQEFLILVIKMGVAAHKKSH

SEQ ID NO: 1026 - protein, 29 aa, Artificial
  helical interface sequence
AGAPVYLAAVLEYLTAEILELAGNWERDN

SEQ ID NO: 1027 - protein, 23 aa, Artificial
  helical interface sequence
TKKTQLQLEHLLLDLQMILNGIN

SEQ ID NO: 1028 - protein, 17 aa, Artificial
  helical interface sequence
NAIELARVVDRSLRDSK

SEQ ID NO: 1029 - protein, 17 aa, Artificial
  helical interface sequence
DEIINFYMNMLMERSKE

SEQ ID NO: 1030 - protein, 21 aa, Artificial
  helical interface sequence
SGTMENLSRRLKVTGDLFDIM

SEQ ID NO: 1031 - protein, 37 aa, Artificial
  helical interface sequence
FLKDFDREVEIRIKQIESDRQNLLKEVDNLYNIEILR

SEQ ID NO: 1032 - protein, 16 aa, Artificial
  helical interface sequence
NKLFLDYTIKCYESFM

SEQ ID NO: 1033 - protein, 14 aa, Artificial
  helical interface sequence
GNLLTQAIRQQYYK

SEQ ID NO: 1034 - protein, 59 aa, Artificial
  helical interface sequence
EMELEIDRNLDQIQQVSNRLKKMALTTGKELDSQQKRLNNIEESTDDLDINLHMNTNRL

SEQ ID NO: 1035 - protein, 14 aa, Artificial
  helical interface sequence
KRAIRTLWHVQDQM

SEQ ID NO: 1036 - protein, 12 aa, Artificial
  helical interface sequence
SKEKEEVAKKCG

SEQ ID NO: 1037 - protein, 25 aa, Artificial
  helical interface sequence
TRRYAACIRDLDYYLRYATYAMLAG

SEQ ID NO: 1038 - protein, 13 aa, Artificial
  helical interface sequence
NSVWNQRHFVISN

SEQ ID NO: 1039 - protein, 22 aa, Artificial
  helical interface sequence
LEVVKDIATESTLYGIETYEKF

SEQ ID NO: 1040 - protein, 20 aa, Artificial
  helical interface sequence
WRDRFLFVAEAIYKAQAETG

SEQ ID NO: 1041 - protein, 62 aa, Artificial; identical to SEQ ID NO: 519
  helical interface sequence

SEQ ID NO: 1042 - protein, 27 aa, Artificial
  helical interface sequence
VGTIFAGAFVFQTVFDTAITSWYENHN

SEQ ID NO: 1043 - protein, 34 aa, Artificial
  helical interface sequence
DERKRLGLKTVIILSSLYLLSIWVKKFKWAGIKT

SEQ ID NO: 1044 - protein, 35 aa, Artificial; identical to SEQ ID NO: 443
  helical interface sequence

SEQ ID NO: 1045 - protein, 31 aa, Artificial; identical to SEQ ID NO: 552
  helical interface sequence

SEQ ID NO: 1046 - protein, 40 aa, Artificial
  helical interface sequence
TLSLLTKAKLHIKKLEDSDRKAVHQIDQLQREQRHLKRQL

SEQ ID NO: 1047 - protein, 27 aa, Artificial
  helical interface sequence
EKRKLIQQQLVLLLHAHKCQRREQANG

SEQ ID NO: 1048 - protein, 22 aa, Artificial
  helical interface sequence
AADCQFWETWLGSQCRLHELRE

SEQ ID NO: 1049 - protein, 29 aa, Artificial
  helical interface sequence
GWIIRYMHANGASMFFICLYMHVGRGLYY

SEQ ID NO: 1050 - protein, 60 aa, Artificial; identical to SEQ ID NO: 412
  helical interface sequence

SEQ ID NO: 1051 - protein, 24 aa, Artificial
  helical interface sequence
PRMNNMSFWLLPPSFLLLLASSMV

SEQ ID NO: 1052 - protein, 28 aa, Artificial
  helical interface sequence
KWRLLAMMTLFFGSGFAAPFFIVRHQLL

SEQ ID NO: 1053 - protein, 39 aa, Artificial
  helical interface sequence
YRPHQSRESLIMLLEEQLEYKRGEIREIEQVCKQVHDKL

SEQ ID NO: 1054 - protein, 19 aa, Artificial
  helical interface sequence
RERIDLLWKIARAGARSAV

SEQ ID NO: 1055 - protein, 16 aa, Artificial
  helical interface sequence
KLPFQRLVREIAQDFK

SEQ ID NO: 1056 - protein, 27 aa, Artificial
  helical interface sequence
IYEETRGVLKVFLENVIRDAVTYTEHA

SEQ ID NO: 1057 - protein, 35 aa, Artificial
  helical interface sequence
QIQESLTTTSTALGKLQDVVNQNAQALNTLVKQLS

SEQ ID NO: 1058 - protein, 35 aa, Artificial
  helical interface sequence
LIPTIKFRHCSLLRNRRCTVAYLYDRLLRIRALRW

SEQ ID NO: 1059 - protein, 29 aa, Artificial
  helical interface sequence
AGAPVYLAAVLEYLTAEILELAGNAARDN

SEQ ID NO: 1060 - protein, 16 aa, Artificial
  helical interface sequence
KTTLTAAITTVLAKTY

SEQ ID NO: 1061 - protein, 57 aa, Artificial; identical to SEQ ID NO: 938
  helical interface sequence

SEQ ID NO: 1062 - protein, 17 aa, Artificial
  helical interface sequence
VTAVRKEIMYYQQALMR

SEQ ID NO: 1063 - protein, 68 aa, Artificial; identical to SEQ ID NO: 817
  helical interface sequence

SEQ ID NO: 1064 - protein, 28 aa, Artificial
  helical interface sequence
SQFLYVLIPAGIYWYWWKNGNEYNEFLY

SEQ ID NO: 1065 - protein, 22 aa, Artificial
  helical interface sequence
SVGTSVASAEQDELSQRLARLR

SEQ ID NO: 1066 - protein, 20 aa, Artificial
  helical interface sequence
PLQLTSQIEHSIRAHISLYY

SEQ ID NO: 1067 - protein, 85 aa, Artificial
  helical interface sequence
QKNNKDSHSLTTNIMEILRGDFSSANNRDNTYNRVSEDLRSRIEVLKRKVIEKVQHIQLLQKNVRAQLVDMKRLEVDIDIKIRSC

SEQ ID NO: 1068 - protein, 10 aa, Artificial
  helical interface sequence
QLMEALMQLS

SEQ ID NO: 1069 - protein, 41 aa, Artificial
  helical interface sequence
MRRLQQTQAQVDEVVDIMRVNVDKVLERDQKLSELDDRADA

SEQ ID NO: 1070 - protein, 12 aa, Artificial
  helical interface sequence
FWERVRSILKSG

SEQ ID NO: 1071 - protein, 39 aa, Artificial; identical to SEQ ID NO: 244
  helical interface sequence

SEQ ID NO: 1072 - protein, 28 aa, Artificial
  helical interface sequence
SQMWLQLSQSLKGWDHMFTVDFWTIMEN

SEQ ID NO: 1073 - protein, 9 aa, Artificial
  helical interface sequence
EDNFVNFFK

SEQ ID NO: 1074 - protein, 29 aa, Artificial
  helical interface sequence
GLIYEETRGVLKVFLENVIRDAVTYTEHA

SEQ ID NO: 1075 - protein, 12 aa, Artificial
  helical interface sequence
KYPLLLRELFAL

SEQ ID NO: 1076 - protein, 34 aa, Artificial
  helical interface sequence
VKQLEAEVEELESEIWHLENEVARLEKENAECEA

SEQ ID NO: 1077 - protein, 50 aa, Artificial; identical to SEQ ID NO: 569
  helical interface sequence

SEQ ID NO: 1078 - protein, 36 aa, Artificial; identical to SEQ ID NO: 581
  helical interface sequence

SEQ ID NO: 1079 - protein, 8 aa, Artificial
  helical interface sequence
KAEIANKQ

SEQ ID NO: 1080 - protein, 32 aa, Artificial
  helical interface sequence
TMWNTISSMGSFISLTAVMLMVFIIWEAFASK

SEQ ID NO: 1081 - protein, 25 aa, Artificial
  helical interface sequence
LEGLKKAAALAVLNARYLKELLKEK

SEQ ID NO: 1082 - protein, 12 aa, Artificial
  helical interface sequence
MEALVETKRVVK

SEQ ID NO: 1083 - protein, 10 aa, Artificial
  helical interface sequence
VDDVLKFTFT

SEQ ID NO: 1084 - protein, 16 aa, Artificial
  helical interface sequence
KLPFQRLVREIAQDFK

SEQ ID NO: 1085 - protein, 36 aa, Artificial
  helical interface sequence
IRGYLIRKAYKKLQDQRIGLSVIQRNIRKWLVLRNW

SEQ ID NO: 1086 - protein, 21 aa, Artificial
  helical interface sequence
NEFTTHILEVINAHMVLSKAN

SEQ ID NO: 1087 - protein, 57 aa, Artificial; identical to SEQ ID NO: 679
  helical interface sequence

SEQ ID NO: 1088 - protein, 29 aa, Artificial
  helical interface sequence
PEFEEQEAIMKVLQRDAALKRAEEERVRH

SEQ ID NO: 1089 - protein, 22 aa, Artificial
  helical interface sequence
PQGGLQNIAVVKHNLGVLTKRS

SEQ ID NO: 1090 - protein, 15 aa, Artificial
  helical interface sequence
IYTVRELCDIADKYS

SEQ ID NO: 1091 - protein, 31 aa, Artificial
  helical interface sequence
KVKQLADKVEELLSKNYHLANEVARLAKLVG

SEQ ID NO: 1092 - protein, 19 aa, Artificial
  helical interface sequence
GSVGTSVASAEQDELSQRL

SEQ ID NO: 1093 - protein, 12 aa, Artificial
  helical interface sequence
DIRILRDIEQYY

SEQ ID NO: 1094 - protein, 27 aa, Artificial
  helical interface sequence
EEEKIRVDIIENQVMDFRTQLIRLCYS

SEQ ID NO: 1095 - protein, 29 aa, Artificial
  helical interface sequence
SSAVMALQEASEAYLVALFEDTNLCAIHA

SEQ ID NO: 1096 - protein, 15 aa, Artificial
  helical interface sequence
SYFPKKISELDAFLK

SEQ ID NO: 1097 - protein, 39 aa, Artificial; identical to SEQ ID NO: 244
  helical interface sequence

SEQ ID NO: 1098 - protein, 11 aa, Artificial
  helical interface sequence
TSMIDRMAEIY

SEQ ID NO: 1099 - protein, 32 aa, Artificial
  helical interface sequence
DVQTAKEFIKIIENAENEYQTAISENYQTMSD

SEQ ID NO: 1100 - protein, 34 aa, Artificial
  helical interface sequence
VKQLKAKVEELKSKLWHLKNKVARLKKKNAECKA

SEQ ID NO: 1101 - protein, 29 aa, Artificial
  helical interface sequence
SSAVMALQEASEAYLVALFEDTNLCAIHA

SEQ ID NO: 1102 - protein, 32 aa, Artificial; identical to SEQ ID NO: 796
  helical interface sequence

SEQ ID NO: 1103 - protein, 16 aa, Artificial
  helical interface sequence
EQVLMELKTLWENKLM

SEQ ID NO: 1104 - protein, 26 aa, Artificial
  helical interface sequence
PEGLRVFYYLVQDLKCLVFSLIGLHF

SEQ ID NO: 1105 - protein, 25 aa, Artificial
  helical interface sequence
PKEQAIGLSVTFLSFLLPAGWVLYH

SEQ ID NO: 1106 - protein, 9 aa, Artificial
  helical interface sequence
ASFLKERLM

SEQ ID NO: 1107 - protein, 28 aa, Artificial
  helical interface sequence
AGFSKLFKKLSDEAWSKTIDIIKHVTKR

SEQ ID NO: 1108 - protein, 28 aa, Artificial
  helical interface sequence
AGFSKLFKKLSDEAWSKTIDIIKHVTKR

SEQ ID NO: 1109 - protein, 28 aa, Artificial
  helical interface sequence
AGFSKLFKKLSDEAWSKTIDIIKHVTKR

SEQ ID NO: 1110 - protein, 28 aa, Artificial
  helical interface sequence
AGFSKLFKKLSDEAWSKTIDIIKHVTKR

SEQ ID NO: 1111 - protein, 28 aa, Artificial
  helical interface sequence
AGFSKLFKKLSDEAWSKTIDIIKHVTKR

SEQ ID NO: 1112 - protein, 28 aa, Artificial
  helical interface sequence
AGFSKLFKKLSDEAWSKTIDIIKHVTKR

SEQ ID NO: 1113 - protein, 28 aa, Artificial
  helical interface sequence
AGFSKLFKKLSDEAWSKTIDIIKHVTKR

SEQ ID NO: 1114 - protein, 28 aa, Artificial
  helical interface sequence
AGFSKLFKKLSDEAWSKTIDIIKHVTKR

SEQ ID NO: 1115 - protein, 28 aa, Artificial
  helical interface sequence
AGFSKLFKKLSDEAWSKTIDIIKHVTKR

SEQ ID NO: 1116 - protein, 28 aa, Artificial
  helical interface sequence
AGFSKLFKKLSDEAWSKTIDIIKHVTKR

SEQ ID NO: 1117 - protein, 28 aa, Artificial
  helical interface sequence
AGFSKLFKKLSDEAWSKTIDIIKHVTKR

SEQ ID NO: 1118 - protein, 25 aa, Artificial
  helical interface sequence
PEETTCSEHCLQKYLKMTQRISMRF

SEQ ID NO: 1119 - protein, 16 aa, Artificial
  helical interface sequence
KTTLTAAITTVLAKTY

SEQ ID NO: 1120 - protein, 17 aa, Artificial
  helical interface sequence
GKTHREFPDAFYDISRD

SEQ ID NO: 1121 - protein, 29 aa, Artificial
  helical interface sequence
PAHMIAISFFFTNALALALHGALVLSAAN

SEQ ID NO: 1122 - protein, 12 aa, Artificial
  helical interface sequence
PEEFDEVSRIVG

SEQ ID NO: 1123 - protein, 9 aa, Artificial
  helical interface sequence
EKELFESYI

SEQ ID NO: 1124 - protein, 21 aa, Artificial
  helical interface sequence
DDHVQFLIYQILRGLKYIHSA

SEQ ID NO: 1125 - protein, 24 aa, Artificial
  helical interface sequence
YFIIKDVFALAVVLLVFFAIVGFM

SEQ ID NO: 1126 - protein, 24 aa, Artificial
  helical interface sequence
YFIIKDVFALAVVLLVFFAIVGFM

SEQ ID NO: 1127 - protein, 24 aa, Artificial
  helical interface sequence
YFIIKDVFALAVVLLVFFAIVGFM

SEQ ID NO: 1128 - protein, 59 aa, Artificial
  helical interface sequence
LGQALEVVIQLQEKHVKDEQIEHWKKIVKTQEELKELLNKMVNLKEKIKELHQQYKEAS

SEQ ID NO: 1129 - protein, 28 aa, Artificial
  helical interface sequence
SQEEQCLSNCVNRFLDTNIRIVNGLQNT

SEQ ID NO: 1130 - protein, 50 aa, Artificial
  helical interface sequence
KRMRNRIAASKSRKRKLERIARLEEKVKTLKAQNSELASTANMLREQVAQ

SEQ ID NO: 1131 - protein, 11 aa, Artificial
  helical interface sequence
KPAIRRLARRG

SEQ ID NO: 1132 - protein, 12 aa, Artificial
  helical interface sequence
RLMKELEEIRKC

SEQ ID NO: 1133 - protein, 23 aa, Artificial
  helical interface sequence
DLNDLYRRLINRNNRLKKLLAQG

SEQ ID NO: 1134 - protein, 19 aa, Artificial
  helical interface sequence
VRPKFMAKAALFHIKETKH

SEQ ID NO: 1135 - protein, 8 aa, Artificial
  helical interface sequence
FKLSGFSF

SEQ ID NO: 1136 - protein, 52 aa, Artificial; identical to SEQ ID NO: 499
  helical interface sequence

SEQ ID NO: 1137 - protein, 10 aa, Artificial
  helical interface sequence
IQEWLQLTMY

SEQ ID NO: 1138 - protein, 12 aa, Artificial
  helical interface sequence
EKVTEMLVNVLN

SEQ ID NO: 1139 - protein, 32 aa, Artificial; identical to SEQ ID NO: 425
  helical interface sequence

SEQ ID NO: 1140 - protein, 29 aa, Artificial
  helical interface sequence
PAHMIAISFFFTNALALALHGALVLSAAN

SEQ ID NO: 1141 - protein, 20 aa, Artificial
  helical interface sequence
WRDRFLFCAEALYKAQAETG

SEQ ID NO: 1142 - protein, 14 aa, Artificial
  helical interface sequence
VSKCCEEFRDYVEE

SEQ ID NO: 1143 - protein, 32 aa, Artificial; identical to SEQ ID NO: 1080
  helical interface sequence

SEQ ID NO: 1144 - protein, 16 aa, Artificial
  helical interface sequence
SQSQEDISLLLQLVQN

SEQ ID NO: 1145 - protein, 11 aa, Artificial
  helical interface sequence
DEFIAHRLGLI

SEQ ID NO: 1146 - protein, 12 aa, Artificial
  helical interface sequence
PLERRLLIDDIS

SEQ ID NO: 1147 - protein, 28 aa, Artificial
  helical interface sequence
AGFSKLFKKLSDEAWSKTIDIIKHVTKR

SEQ ID NO: 1148 - protein, 29 aa, Artificial
  helical interface sequence
SSAVMALQEASEAYLVALFEDTNLCAIHA

SEQ ID NO: 1149 - protein, 23 aa, Artificial
  helical interface sequence
EDKRAKVTSAMQTMLFTMLRKLD

SEQ ID NO: 1150 - protein, 38 aa, Artificial
  helical interface sequence
LLSGIVQQQNNLLRAIEAQQHLLQLTVWGIKQLQARIL

SEQ ID NO: 1151 - protein, 13 aa, Artificial
  helical interface sequence
AEDHRVWKDYVHT

SEQ ID NO: 1152 - protein, 29 aa, Artificial
  helical interface sequence
LARVHYHRTLKAIVYLQCCYRRMMAKREL

SEQ ID NO: 1153 - protein, 13 aa, Artificial
  helical interface sequence
AEDHRVWKDYVHT

SEQ ID NO: 1154 - protein, 24 aa, Artificial
  helical interface sequence
PEELAFAREFMANTESYLKNVALK

SEQ ID NO: 1155 - protein, 38 aa, Artificial; identical to SEQ ID NO: 708
  helical interface sequence

SEQ ID NO: 1156 - protein, 31 aa, Artificial; identical to SEQ ID NO: 852
  helical interface sequence

SEQ ID NO: 1157 - protein, 52 aa, Artificial; identical to SEQ ID NO: 499
  helical interface sequence

SEQ ID NO: 1158 - protein, 19 aa, Artificial
  helical interface sequence
ELAKHAVSEGTKAVTKYTS

SEQ ID NO: 1159 - protein, 9 aa, Artificial
  helical interface sequence
TLKFWDIFR

SEQ ID NO: 1160 - protein, 32 aa, Artificial; identical to SEQ ID NO: 462
  helical interface sequence

SEQ ID NO: 1161 - protein, 25 aa, Artificial
  helical interface sequence
SDRMAACLRDMEIILRYVTYAVFAG

SEQ ID NO: 1162 - protein, 19 aa, Artificial
  helical interface sequence
DRRNKKRDFRRLWIQRINA

SEQ ID NO: 1163 - protein, 22 aa, Artificial
  helical interface sequence
PQGGLQNIAVVKHNLGVLTKRS

SEQ ID NO: 1164 - protein, 10 aa, Artificial
  helical interface sequence
ERELLESYID

SEQ ID NO: 1165 - protein, 14 aa, Artificial
  helical interface sequence
SGTAMAQIAAEELG

SEQ ID NO: 1166 - protein, 23 aa, Artificial
  helical interface sequence
PREKDKLLLFTAALVAERRLARG

SEQ ID NO: 1167 - protein, 29 aa, Artificial
  helical interface sequence
SSAVMALQEASEAYLVGLFEDTNLCAIHA

SEQ ID NO: 1168 - protein, 23 aa, Artificial
  helical interface sequence
DWVLEREVQYAYSWYNNIVHDTF

SEQ ID NO: 1169 - protein, 30 aa, Artificial; identical to SEQ ID NO: 567
  helical interface sequence

SEQ ID NO: 1170 - protein, 15 aa, Artificial
  helical interface sequence
VSKCCEEFRDYVEER

SEQ ID NO: 1171 - protein, 53 aa, Artificial; identical to SEQ ID NO: 171
  helical interface sequence

SEQ ID NO: 1172 - protein, 22 aa, Artificial
  helical interface sequence
AADCQFWETWLGSQCRLHELRE

SEQ ID NO: 1173 - protein, 63 aa, Artificial; identical to SEQ ID NO: 606
  helical interface sequence

SEQ ID NO: 1174 - protein, 25 aa, Artificial
  helical interface sequence
LEGLKKAAALAVLNARYLKELLKEK

SEQ ID NO: 1175 - protein, 20 aa, Artificial
  helical interface sequence
FQEFLILVIKMGVAAHKKSH

SEQ ID NO: 1176 - protein, 29 aa, Artificial
  helical interface sequence
SSAVMALQEASEAYLVALFEDTNLCAIHA

SEQ ID NO: 1177 - protein, 24 aa, Artificial
  helical interface sequence
YFIIKDVFALAVVLLVFFAIVGFM

SEQ ID NO: 1178 - protein, 32 aa, Artificial; identical to SEQ ID NO: 462
  helical interface sequence

SEQ ID NO: 1179 - protein, 15 aa, Artificial
  helical interface sequence
MRKIEKTIQYLIGSG

SEQ ID NO: 1180 - protein, 14 aa, Artificial
  helical interface sequence
YIRYSQICAKAVRD

SEQ ID NO: 1181 - protein, 19 aa, Artificial
  helical interface sequence
EAAFAELFQHFAPKVKGFL

SEQ ID NO: 1182 - protein, 7 aa, Artificial
  helical interface sequence
IEYNVEH

SEQ ID NO: 1183 - protein, 26 aa, Artificial
  helical interface sequence
EAERVRVFHKQAFEYISIALRIDEDE

SEQ ID NO: 1184 - protein, 7 aa, Artificial
  helical interface sequence
RPLVEAG

SEQ ID NO: 1185 - protein, 19 aa, Artificial
  helical interface sequence
PYVNILRGSIATFSASVGG

SEQ ID NO: 1186 - protein, 27 aa, Artificial
  helical interface sequence
IYEETRGVLKVFLENVIRDAVTYTEHA

SEQ ID NO: 1187 - protein, 44 aa, Artificial; identical to SEQ ID NO: 619
  helical interface sequence

SEQ ID NO: 1188 - protein, 19 aa, Artificial
  helical interface sequence
TLDEAERQWKAEFHRWSSY

SEQ ID NO: 1189 - protein, 12 aa, Artificial
  helical interface sequence
PETLHNVMWAMS

SEQ ID NO: 1190 - protein, 23 aa, Artificial
  helical interface sequence
AADCQFWETWLGSQCRLHELREK

SEQ ID NO: 1191 - protein, 27 aa, Artificial
  helical interface sequence
IYEETRGVLKVFLENVIRDAVTYTEHA

SEQ ID NO: 1192 - protein, 9 aa, Artificial
  helical interface sequence
ASFLKERLM

SEQ ID NO: 1193 - protein, 27 aa, Artificial
  helical interface sequence
PEETTCSEHCLQKYLKMTQRISMRFQE

SEQ ID NO: 1194 - protein, 29 aa, Artificial
  helical interface sequence
DGLNQLYNLVAQDYALTDTIEALSRMLHR

SEQ ID NO: 1195 - protein, 29 aa, Artificial
  helical interface sequence
SSAVMALQEASEAYLVGLFEDTNLCAIHA

SEQ ID NO: 1196 - protein, 29 aa, Artificial
  helical interface sequence
AGAPVYLAAVLEYLTAEILELAGNAARDN

SEQ ID NO: 1197 - protein, 19 aa, Artificial
  helical interface sequence
TPCREGVAGFMVNLFAKIG

SEQ ID NO: 1198 - protein, 14 aa, Artificial
  helical interface sequence
AVDTYCRHNYGVGE

SEQ ID NO: 1199 - protein, 27 aa, Artificial
  helical interface sequence
PEGLRVFYYLVQDLKCLVFSLIGLHFK

SEQ ID NO: 1200 - protein, 11 aa, Artificial
  helical interface sequence
IDMNFQSDLLS

SEQ ID NO: 1201 - protein, 11 aa, Artificial
  helical interface sequence
KPAIRRLARRG

SEQ ID NO: 1202 - protein, 21 aa, Artificial
  helical interface sequence
SGTMENLSRRLKVTGDLFDIM

SEQ ID NO: 1203 - protein, 28 aa, Artificial
  helical interface sequence
LDTFVKQGRELARQQFLVRWHIQRITSP

SEQ ID NO: 1204 - protein, 35 aa, Artificial
  helical interface sequence
TNHHEMLQNLQTVVNELYREDVDYVADKILTRQTV

SEQ ID NO: 1205 - protein, 16 aa, Artificial
  helical interface sequence
VTAVRKEIMYYQQALM

SEQ ID NO: 1206 - protein, 24 aa, Artificial
  helical interface sequence
YFIIKDVFALAVVLLVFFAIVGFM

SEQ ID NO: 1207 - protein, 32 aa, Artificial; identical to SEQ ID NO: 462
  helical interface sequence

SEQ ID NO: 1208 - protein, 35 aa, Artificial
  helical interface sequence
GIVQQQQQLLDVVKRQQELLRLTVWGTKNLQTRVT

SEQ ID NO: 1209 - protein, 60 aa, Artificial; identical to SEQ ID NO: 711
  helical interface sequence

SEQ ID NO: 1210 - protein, 21 aa, Artificial
  helical interface sequence
SNEYLILASTLHGVFAIASQL

SEQ ID NO: 1211 - protein, 12 aa, Artificial
  helical interface sequence
EGLHQAIEAKEG

SEQ ID NO: 1212 - protein, 44 aa, Artificial; identical to SEQ ID NO: 695
  helical interface sequence

SEQ ID NO: 1213 - protein, 15 aa, Artificial
  helical interface sequence
VSDRAWALFRALDGK

SEQ ID NO: 1214 - protein, 13 aa, Artificial
  helical interface sequence
YVEGWKKTFEEDF

SEQ ID NO: 1215 - protein, 11 aa, Artificial
  helical interface sequence
KPAIRRLARRG

SEQ ID NO: 1216 - protein, 38 aa, Artificial; identical to SEQ ID NO: 214
  helical interface sequence

SEQ ID NO: 1217 - protein, 13 aa, Artificial
  helical interface sequence
AAEGAALFWRWTM

SEQ ID NO: 1218 - protein, 29 aa, Artificial
  helical interface sequence
SKAMSIMNSFVNDVFERIAGEASRLAHYN

SEQ ID NO: 1219 - protein, 14 aa, Artificial
  helical interface sequence
DEQIAAQVDYIVAN

SEQ ID NO: 1220 - protein, 14 aa, Artificial
  helical interface sequence
PWSKAFLASAYASR

SEQ ID NO: 1221 - protein, 9 aa, Artificial
  helical interface sequence
FMDVYQRSY

SEQ ID NO: 1222 - protein, 9 aa, Artificial
  helical interface sequence
LEELRKQRG

SEQ ID NO: 1223 - protein, 14 aa, Artificial
  helical interface sequence
ITDIVSSLQLQFES

SEQ ID NO: 1224 - protein, 12 aa, Artificial
  helical interface sequence
ESILDEHVQRVM

SEQ ID NO: 1225 - protein, 52 aa, Artificial
  helical interface sequence
KRMENLNNKVDDGFLDIWTYNAELLVLLENERTLDFHDSNVKNLYEKVKSQL

SEQ ID NO: 1226 - protein, 46 aa, Artificial; identical to SEQ ID NO: 556
  helical interface sequence

SEQ ID NO: 1227 - protein, 73 aa, Artificial
  helical interface sequence
ELEEMQRRADQLADESLESTRRMLQLVEESKDAGIRTLVMLDEQGEQLDRVEEGMNHINQDMKEAEKNLKDLG

SEQ ID NO: 1228 - protein, 11 aa, Artificial
  helical interface sequence
WRPIVQFLRYQ

SEQ ID NO: 1229 - protein, 21 aa, Artificial
  helical interface sequence
RNAFQTLLNAATYEYRDRRNK

SEQ ID NO: 1230 - protein, 18 aa, Artificial
  helical interface sequence
RREIELSKVIREALESAV

SEQ ID NO: 1231 - protein, 19 aa, Artificial
  helical interface sequence
ESFVPSLTQDLEVYRKVVK

SEQ ID NO: 1232 - protein, 8 aa, Artificial
  helical interface sequence
DEEVDEMI

SEQ ID NO: 1233 - protein, 52 aa, Artificial; identical to SEQ ID NO: 499
  helical interface sequence

SEQ ID NO: 1234 - protein, 22 aa, Artificial
  helical interface sequence
QSDEARHMTLGLEVIKFILEQH

SEQ ID NO: 1235 - protein, 18 aa, Artificial
  helical interface sequence
RREIELSKVIREALESAV

SEQ ID NO: 1236 - protein, 10 aa, Artificial
  helical interface sequence
DTFIQKTKKL

SEQ ID NO: 1237 - protein, 32 aa, Artificial; identical to SEQ ID NO: 462
  helical interface sequence

SEQ ID NO: 1238 - protein, 24 aa, Artificial
  helical interface sequence
YFIIKDVFALAVVLLVFFAIVGFM

SEQ ID NO: 1239 - protein, 25 aa, Artificial
  helical interface sequence
SDRMAACLRDMEIILRYVTYAVFAG

SEQ ID NO: 1240 - protein, 62 aa, Artificial
  helical interface sequence
EVQARHQELLKLEKSMAELTQLFNDMEELVIEQQENVDVIDKNVEDAQLDVEQGVGHTDKAV

SEQ ID NO: 1241 - protein, 30 aa, Artificial; identical to SEQ ID NO: 366
  helical interface sequence

SEQ ID NO: 1242 - protein, 8 aa, Artificial
  helical interface sequence
FEHYWAQL

SEQ ID NO: 1243 - protein, 18 aa, Artificial
  helical interface sequence
EEEIEVFQKQLSDILDFI

SEQ ID NO: 1244 - protein, 7 aa, Artificial
  helical interface sequence
LIEKFLR

SEQ ID NO: 1245 - protein, 24 aa, Artificial
  helical interface sequence
YYVESLTRSLADAAWKEFQEVEKL

SEQ ID NO: 1246 - protein, 29 aa, Artificial
  helical interface sequence
SSAVMALQEASEAYLVALFEDTNLCAIHA

SEQ ID NO: 1247 - protein, 9 aa, Artificial
  helical interface sequence
LPELLKVSG

SEQ ID NO: 1248 - protein, 25 aa, Artificial
  helical interface sequence
QRGKDKCARDIGYYLRMVTYCLIAG

SEQ ID NO: 1249 - protein, 33 aa, Artificial
  helical interface sequence
VKQLEAEVEELESEIWHLENEVARLEKENAECE

SEQ ID NO: 1250 - protein, 18 aa, Artificial
  helical interface sequence
AEASRVYEIIVESVVNEV

SEQ ID NO: 1251 - protein, 19 aa, Artificial
  helical interface sequence
TDTCYVLSYSVIMLNTDLH

SEQ ID NO: 1252 - protein, 26 aa, Artificial
  helical interface sequence
PEGLRCFYYLVQDLKCLVFSLIGLHF

SEQ ID NO: 1253 - protein, 13 aa, Artificial
  helical interface sequence
EREKLVIQLIFYE

SEQ ID NO: 1254 - protein, 22 aa, Artificial
  helical interface sequence
KETLSERLSALQDKIIDHYEND

SEQ ID NO: 1255 - protein, 19 aa, Artificial
  helical interface sequence
PQEFFFHAMGGREGLIDTA

SEQ ID NO: 1256 - protein, 16 aa, Artificial
  helical interface sequence
KRPYYLRGFYDWLVDN

SEQ ID NO: 1257 - protein, 16 aa, Artificial
  helical interface sequence
DFEILEMAVRELAIEK

SEQ ID NO: 1258 - protein, 11 aa, Artificial
  helical interface sequence
KPAIRRLARRG

SEQ ID NO: 1259 - protein, 29 aa, Artificial
  helical interface sequence
SSAVMALQEASEAYLVGLFEDTNLCAIHA

SEQ ID NO: 1260 - protein, 52 aa, Artificial
  helical interface sequence
QVDEVIDVMQENITKVIERGERLDELQDKSESLSDNATAFSNRSKQLRRQMW

SEQ ID NO: 1261 - protein, 9 aa, Artificial
  helical interface sequence
QHVKSALAS

SEQ ID NO: 1262 - protein, 32 aa, Artificial
  helical interface sequence
DLKVSIHQMEMERIRYVLSSYLRCRLMKIEKF

SEQ ID NO: 1263 - protein, 22 aa, Artificial
  helical interface sequence
AEEMEWFNNYKRSLATYMRSLG

SEQ ID NO: 1264 - protein, 30 aa, Artificial; identical to SEQ ID NO: 1011
  helical interface sequence

SEQ ID NO: 1265 - protein, 21 aa, Artificial
  helical interface sequence
YYSFKDILGLTLMLTPFLTLA

SEQ ID NO: 1266 - protein, 30 aa, Artificial; identical to SEQ ID NO: 702
  helical interface sequence

SEQ ID NO: 1267 - protein, 16 aa, Artificial
  helical interface sequence
MRKRVADFQKVLNRAK

SEQ ID NO: 1268 - protein, 52 aa, Artificial
  helical interface sequence
RIRRERNKMAAAKSRNRRRELTDTLQAETDQLEDEKSALQTEIANLLKEKEK

SEQ ID NO: 1269 - protein, 25 aa, Artificial
  helical interface sequence
SRRMAACLRDMEIILRYVTYAIFAG

SEQ ID NO: 1270 - protein, 11 aa, Artificial
  helical interface sequence
KPAIRRLARRG

SEQ ID NO: 1271 - protein, 47 aa, Artificial
  helical interface sequence
FLDQNMLAVIDELMQALYKTKIKLCILLHAFRIRAVTIDRVMSYLNA

SEQ ID NO: 1272 - protein, 16 aa, Artificial
  helical interface sequence
AFQAQCRGYLARKAFA

SEQ ID NO: 1273 - protein, 11 aa, Artificial
  helical interface sequence
RVTYKNVPNWH

SEQ ID NO: 1274 - protein, 21 aa, Artificial
  helical interface sequence
IWPFMASVGAFVMLFGAVLWM

SEQ ID NO: 1275 - protein, 35 aa, Artificial; identical to SEQ ID NO: 226
  helical interface sequence

SEQ ID NO: 1276 - protein, 15 aa, Artificial
  helical interface sequence
VFTWSLPFVGEKVTE

SEQ ID NO: 1277 - protein, 52 aa, Artificial; identical to SEQ ID NO: 1225
  helical interface sequence

SEQ ID NO: 1278 - protein, 40 aa, Artificial
  helical interface sequence
YFSKGIPNVLRRTRACILRVAPPFVAFYLVYTWGTQEFEK

SEQ ID NO: 1279 - protein, 52 aa, Artificial
  helical interface sequence
KQIGNVINWTRDSMTEVWSYNAELLVAMENQHTIDLTDSEMNKLYERVKRQL

SEQ ID NO: 1280 - protein, 20 aa, Artificial
  helical interface sequence
WRDRFLFVAEAIYKAQAETG

SEQ ID NO: 1281 - protein, 25 aa, Artificial
  helical interface sequence
PAMMWALGFIFLFTVGGLTGIVLAN

SEQ ID NO: 1282 - protein, 32 aa, Artificial
  helical interface sequence
PIMEELLHFHDHTLMIVFLISSLVLYIISLML

SEQ ID NO: 1283 - protein, 11 aa, Artificial
  helical interface sequence
KPAIRRLARRG

SEQ ID NO: 1284 - protein, 11 aa, Artificial
  helical interface sequence
KPAIRRLARRG

SEQ ID NO: 1285 - protein, 17 aa, Artificial
  helical interface sequence
NAIELARVVDRSLRDSK

SEQ ID NO: 1286 - protein, 24 aa, Artificial
  helical interface sequence
ATGKAKCARDIGYYLRMVTYCLVV

SEQ ID NO: 1287 - protein, 26 aa, Artificial
  helical interface sequence
DDLDQFIKNYLDIRTQYHLRREKLAT

SEQ ID NO: 1288 - protein, 24 aa, Artificial
  helical interface sequence
YFIIKDVFALAVVLLVFFAIVGFM

SEQ ID NO: 1289 - protein, 24 aa, Artificial
  helical interface sequence
YFIIKDVFALAVVLLVFFAIVGFM

SEQ ID NO: 1290 - protein, 6 aa, Artificial
  helical interface sequence
FRQHYA

SEQ ID NO: 1291 - protein, 17 aa, Artificial
  helical interface sequence
RFETKALADAKAALEAL

SEQ ID NO: 1292 - protein, 22 aa, Artificial
  helical interface sequence
KDLLEQRRAAVDTYCRHNYGVG

SEQ ID NO: 1293 - protein, 25 aa, Artificial
  helical interface sequence
TAPVAAVQAAVSNLVRVGKETVQTT

SEQ ID NO: 1294 - protein, 31 aa, Artificial
  helical interface sequence
AGARVACQMQAIDELRHSQTQQHAMSHYNKH

SEQ ID NO: 1295 - protein, 11 aa, Artificial
  helical interface sequence
STTMIRILKEM

SEQ ID NO: 1296 - protein, 63 aa, Artificial; identical to SEQ ID NO: 851
  helical interface sequence

SEQ ID NO: 1297 - protein, 10 aa, Artificial
  helical interface sequence
VRLEHVARTL

SEQ ID NO: 1298 - protein, 38 aa, Artificial
  helical interface sequence
TDFAGKIHAFRDQFKQLEENFEDLHEQKDKVQALLENA

SEQ ID NO: 1299 - protein, 27 aa, Artificial
  helical interface sequence
PERILLEAGKSIIRKIEELEKKLVEVV

SEQ ID NO: 1300 - protein, 16 aa, Artificial
  helical interface sequence
DDEMEEERRLAYVGIT

SEQ ID NO: 1301 - protein, 16 aa, Artificial
  helical interface sequence
TGRLFFEFYRLLHDAR

SEQ ID NO: 1302 - protein, 25 aa, Artificial
  helical interface sequence
SDRMAACLRDMEIILRYVTYAVFAG

SEQ ID NO: 1303 - protein, 25 aa, Artificial
  helical interface sequence
RSILENLRSKIQKLESDVSAQMEYC

SEQ ID NO: 1304 - protein, 15 aa, Artificial
  helical interface sequence
IDQVINSAAKTYYMS

SEQ ID NO: 1305 - protein, 29 aa, Artificial
  helical interface sequence
QNVVIAMSGISKVFVGEVVEEALDVCEKW

SEQ ID NO: 1306 - protein, 29 aa, Artificial
  helical interface sequence
SKAMGIMNSFVNDIFERIAGEASRLAHYN

SEQ ID NO: 1307 - protein, 19 aa, Artificial
  helical interface sequence
DWVLEREVQYAYSWYNNIV

SEQ ID NO: 1308 - protein, 7 aa, Artificial
  helical interface sequence
EKDIVFG

SEQ ID NO: 1309 - protein, 29 aa, Artificial
  helical interface sequence
SSAIGALQESVEAYLVSLFEDTNLAAIHA

SEQ ID NO: 1310 - protein, 20 aa, Artificial
  helical interface sequence
WRDRFLFVAEAIYKAQAETG

SEQ ID NO: 1311 - protein, 68 aa, Artificial
  helical interface sequence
LEEMQRRADQLADESLESTRRMLQLVEESKDAGIRTLVMLDEQGEQLERIEEGMDQINKDMKEAEKNL

SEQ ID NO: 1312 - protein, 34 aa, Artificial; identical to SEQ ID NO: 701
  helical interface sequence

SEQ ID NO: 1313 - protein, 32 aa, Artificial; identical to SEQ ID NO: 425
  helical interface sequence

SEQ ID NO: 1314 - protein, 25 aa, Artificial
  helical interface sequence
PFHGLSIAFLYGSALLFAMHGATIL

SEQ ID NO: 1315 - protein, 22 aa, Artificial
  helical interface sequence
ASLAMRVLETFDKVVAETLKDN

SEQ ID NO: 1316 - protein, 14 aa, Artificial
  helical interface sequence
VSKCCEEFRDYVEE

SEQ ID NO: 1317 - protein, 11 aa, Artificial
  helical interface sequence
KPAIRRLARRG

SEQ ID NO: 1318 - protein, 9 aa, Artificial
  helical interface sequence
KKWIQKVID

SEQ ID NO: 1319 - protein, 16 aa, Artificial
  helical interface sequence
FASAVRILEVVKDKAG

SEQ ID NO: 1320 - protein, 18 aa, Artificial
  helical interface sequence
RREIELSKVIREALESAV

SEQ ID NO: 1321 - protein, 14 aa, Artificial
  helical interface sequence
AEDHRVWKDYVHTL

SEQ ID NO: 1322 - protein, 24 aa, Artificial
  helical interface sequence
LASLAIYSFWIFLAGLIYYLQTEN

SEQ ID NO: 1323 - protein, 29 aa, Artificial
  helical interface sequence
SSAVMALQEASEAYLVGLFEDTNLCAIHA

SEQ ID NO: 1324 - protein, 24 aa, Artificial
  helical interface sequence
YFIIKDVFALAVVLLVFFAIVGFM

SEQ ID NO: 1325 - protein, 18 aa, Artificial
  helical interface sequence
DENILRNAVNLQVLKFHY

SEQ ID NO: 1326 - protein, 29 aa, Artificial
  helical interface sequence
KRKEQEAKKKLLAYLKYIPEVSRSLATFL

SEQ ID NO: 1327 - protein, 21 aa, Artificial
  helical interface sequence
AARRRARECAVQALYSWQLSQ

SEQ ID NO: 1328 - protein, 32 aa, Artificial
  helical interface sequence
SGKYIKLQNVYREKAKKDAAAVGNHVAKLLQS

SEQ ID NO: 1329 - protein, 29 aa, Artificial
  helical interface sequence
NQQWEKLQHMFQVYRVSFTRDIQELVKMM

SEQ ID NO: 1330 - protein, 17 aa, Artificial
  helical interface sequence
PAVTLAHELIHAEHRLY

SEQ ID NO: 1331 - protein, 25 aa, Artificial
  helical interface sequence
SLQENEFRLYYYNKFKDVASTLNKA

SEQ ID NO: 1332 - protein, 25 aa, Artificial
  helical interface sequence
HAPYVKDKAEEWRYTDRFLQGYSAD

SEQ ID NO: 1333 - protein, 24 aa, Artificial
  helical interface sequence
LAMWNAYAAAGLMAATMVNQGAAR

SEQ ID NO: 1334 - protein, 30 aa, Artificial
  helical interface sequence
DTCNEETQNLSTIYLREYQSKVKRQIFSDY

SEQ ID NO: 1335 - protein, 27 aa, Artificial
  helical interface sequence
GCRMKGLIDEVDQDFTSRINKLRDSLF

SEQ ID NO: 1336 - protein, 11 aa, Artificial
  helical interface sequence
RVTYKNVPNWH

SEQ ID NO: 1337 - protein, 37 aa, Artificial; identical to SEQ ID NO: 622
  helical interface sequence

SEQ ID NO: 1338 - protein, 10 aa, Artificial
  helical interface sequence
EQTTVWLLTN

SEQ ID NO: 1339 - protein, 21 aa, Artificial
  helical interface sequence
NAPGAVANRVALEACVQARNE

SEQ ID NO: 1340 - protein, 9 aa, Artificial
  helical interface sequence
TEEILAMIK

SEQ ID NO: 1341 - protein, 16 aa, Artificial
  helical interface sequence
FQEYITFLGALAMIYN

SEQ ID NO: 1342 - protein, 16 aa, Artificial
  helical interface sequence
KLPFQRLVREIAQDFK

SEQ ID NO: 1343 - protein, 27 aa, Artificial
  helical interface sequence
PKDALLKAIENIRGMTSHYIDEIKGLT

SEQ ID NO: 1344 - protein, 24 aa, Artificial
  helical interface sequence
PERILLEAGKSIIRKIEELEKKLV

SEQ ID NO: 1345 - protein, 25 aa, Artificial
  helical interface sequence
MEDLREQTHTRHYELYRRCKLEEMG

SEQ ID NO: 1346 - protein, 21 aa, Artificial
  helical interface sequence
SKNIHIAAEAMRQAYADRSVY

SEQ ID NO: 1347 - protein, 25 aa, Artificial
  helical interface sequence
SDRMAACLRDMEIILRYVTYAVFAG

SEQ ID NO: 1348 - protein, 21 aa, Artificial
  helical interface sequence
LDYKLLQLFKLFENALFSVLY

SEQ ID NO: 1349 - protein, 40 aa, Artificial
  helical interface sequence
ITAEFLVKSKHRDLTALCKEYDELAETQGKLEEKLQELEA

SEQ ID NO: 1350 - protein, 7 aa, Artificial
  helical interface sequence
PPCILNN

SEQ ID NO: 1351 - protein, 61 aa, Artificial; identical to SEQ ID NO: 337
  helical interface sequence

SEQ ID NO: 1352 - protein, 30 aa, Artificial
  helical interface sequence
VKQLEDVVEELLSVNYHLENVVARLKKLVG

SEQ ID NO: 1353 - protein, 18 aa, Artificial
  helical interface sequence
GKQYESVLMVSIDQLLDS

SEQ ID NO: 1354 - protein, 16 aa, Artificial
  helical interface sequence
MRKRVADFQKVLNRAK

SEQ ID NO: 1355 - protein, 15 aa, Artificial
  helical interface sequence
TDRIFGKVFLQEFVD

SEQ ID NO: 1356 - protein, 11 aa, Artificial
  helical interface sequence
IKNLRRVAKEL

SEQ ID NO: 1357 - protein, 18 aa, Artificial
  helical interface sequence
EEEIEVFQKQLSDILDFI

SEQ ID NO: 1358 - protein, 10 aa, Artificial
  helical interface sequence
FEYRARVVRE

SEQ ID NO: 1359 - protein, 23 aa, Artificial
  helical interface sequence
QWLYSARGDFFRATSRLTTDFGN

SEQ ID NO: 1360 - protein, 9 aa, Artificial
  helical interface sequence
ERELLESYI

SEQ ID NO: 1361 - protein, 6 aa, Artificial
  helical interface sequence
FGVLAD

SEQ ID NO: 1362 - protein, 11 aa, Artificial
  helical interface sequence
KPAIRRLARRG

SEQ ID NO: 1363 - protein, 24 aa, Artificial
  helical interface sequence
ELDQLRQEAEQLKNQIRDARKACA

SEQ ID NO: 1364 - protein, 17 aa, Artificial
  helical interface sequence
VEEFFHLQHYLDTATAP

SEQ ID NO: 1365 - protein, 16 aa, Artificial
  helical interface sequence
QKIVNLKEKVAQLEAQ

SEQ ID NO: 1366 - protein, 12 aa, Artificial
  helical interface sequence
PDHEDTFFRDLV

SEQ ID NO: 1367 - protein, 73 aa, Artificial; identical to SEQ ID NO: 1227
  helical interface sequence

SEQ ID NO: 1368 - protein, 19 aa, Artificial
  helical interface sequence
TNFKNQISWLLFTTDSRLN

SEQ ID NO: 1369 - protein, 29 aa, Artificial
  helical interface sequence
TLLMIGLTTNMLTMYQWWRDVIRESTFQG

SEQ ID NO: 1370 - protein, 13 aa, Artificial
  helical interface sequence
FHRRELWEAIEAG

SEQ ID NO: 1371 - protein, 16 aa, Artificial
  helical interface sequence
KLPFQRLVREIAQDFK

SEQ ID NO: 1372 - protein, 17 aa, Artificial
  helical interface sequence
KKNFIAVSAANRFKKIS

SEQ ID NO: 1373 - protein, 12 aa, Artificial
  helical interface sequence
MWERVKSIIKSS

SEQ ID NO: 1374 - protein, 24 aa, Artificial
  helical interface sequence
KQVESRKGEEERNANRAEHFKKTG

SEQ ID NO: 1375 - protein, 10 aa, Artificial
  helical interface sequence
YEEFVQMMTA

SEQ ID NO: 1376 - protein, 23 aa, Artificial
  helical interface sequence
EMERGLFQTGQKGLNDFQCWEKG

SEQ ID NO: 1377 - protein, 29 aa, Artificial
  helical interface sequence
SKAMGIMNSFVNDIFERIASEASRLAHYN

SEQ ID NO: 1378 - protein, 34 aa, Artificial
  helical interface sequence
RRIENLNKKMEDGFLDVWTYNAELLVLMENERTL

SEQ ID NO: 1379 - protein, 15 aa, Artificial
  helical interface sequence
PLDVVELVVRELENI

SEQ ID NO: 1380 - protein, 12 aa, Artificial
  helical interface sequence
PDHEDTFFRDLV

SEQ ID NO: 1381 - protein, 22 aa, Artificial
  helical interface sequence
EMERGLFQTGQKGLNDFQCWEK

SEQ ID NO: 1382 - protein, 25 aa, Artificial
  helical interface sequence
SDRMAACLRDMEIILRYVTYAVFAG

SEQ ID NO: 1383 - protein, 8 aa, Artificial
  helical interface sequence
DLVQQRMF

SEQ ID NO: 1384 - protein, 12 aa, Artificial
  helical interface sequence
RFNLKSIEEQLG

SEQ ID NO: 1385 - protein, 22 aa, Artificial
  helical interface sequence
VLSKFFFFIFVFNFVLLGQIGA

SEQ ID NO: 1386 - protein, 30 aa, Artificial
  helical interface sequence
HDERKRLGLKTVIILSSLYLLSIWVKKFKW

SEQ ID NO: 1387 - protein, 22 aa, Artificial
  helical interface sequence
YPEYVSIQREKDAGAYSVKAAL

SEQ ID NO: 1388 - protein, 26 aa, Artificial
  helical interface sequence
TKKTQAASVEAVKMLDEILLQLSASV

SEQ ID NO: 1389 - protein, 40 aa, Artificial
  helical interface sequence
DETVNSNIPTNLRVLRSILENLRSKIQKLESDVSAQMEYC

SEQ ID NO: 1390 - protein, 95 aa, Artificial; identical to SEQ ID NO: 346
  helical interface sequence

SEQ ID NO: 1391 - protein, 10 aa, Artificial
  helical interface sequence
ERELLESYID

SEQ ID NO: 1392 - protein, 12 aa, Artificial
  helical interface sequence
FWERVRSILKSG

SEQ ID NO: 1393 - protein, 22 aa, Artificial
  helical interface sequence
CTEELLDFLHARDHCVAHKLFN

SEQ ID NO: 1394 - protein, 12 aa, Artificial
  helical interface sequence
TIDEIIEAIEKL

SEQ ID NO: 1395 - protein, 13 aa, Artificial
  helical interface sequence
DVVELVMELEDEF

SEQ ID NO: 1396 - protein, 13 aa, Artificial
  helical interface sequence
KFWEGVLRVLNQI

SEQ ID NO: 1397 - protein, 25 aa, Artificial
  helical interface sequence
SRRMAACLRDMEIILRYVTYAVFAG

SEQ ID NO: 1398 - protein, 25 aa, Artificial
  helical interface sequence
SRRMAACLRDMEIILRYVTYAVFAG

SEQ ID NO: 1399 - protein, 16 aa, Artificial
  helical interface sequence
APSAFYGYGWAQARSH

SEQ ID NO: 1400 - protein, 20 aa, Artificial
  helical interface sequence
WRDRFLFVAEAIYKAQAETG

SEQ ID NO: 1401 - protein, 17 aa, Artificial
  helical interface sequence
PQLMAAFIKQRTAKYVA

SEQ ID NO: 1402 - protein, 32 aa, Artificial
  helical interface sequence
PFYRFYMLREGTAVPAVWFSIELIFGLFALKN

SEQ ID NO: 1403 - protein, 24 aa, Artificial
  helical interface sequence
KQGESLAVMDARNEWRVWNMKKTG

SEQ ID NO: 1404 - protein, 9 aa, Artificial
  helical interface sequence
LEELRKQRG

SEQ ID NO: 1405 - protein, 47 aa, Artificial
  helical interface sequence
ILEEVRILEQIGVSHDAQIQELSEMWRVNQQFVTRLQQQLVDIRQTC

SEQ ID NO: 1406 - protein, 24 aa, Artificial
  helical interface sequence
PEHDHRKRMGLKMLLMMGLLLPLV

SEQ ID NO: 1407 - protein, 29 aa, Artificial
  helical interface sequence
TLGIHRLGLLLSLSAVFFSALCMIITGTI

SEQ ID NO: 1408 - protein, 20 aa, Artificial
  helical interface sequence
WRDRFLFCAEALYKAQAETG

SEQ ID NO: 1409 - protein, 14 aa, Artificial
  helical interface sequence
EREKLVIQLIFYEE

SEQ ID NO: 1410 - protein, 37 aa, Artificial; identical to SEQ ID NO: 288
  helical interface sequence

SEQ ID NO: 1411 - protein, 11 aa, Artificial
  helical interface sequence
WRPIVQFLRYQ

SEQ ID NO: 1412 - protein, 16 aa, Artificial
  helical interface sequence
DWERLTFGLVAGCMAQ

SEQ ID NO: 1413 - protein, 30 aa, Artificial
  helical interface sequence
VDTRAYFTSATMIIAIPTGVKVFSWLATLH

SEQ ID NO: 1414 - protein, 26 aa, Artificial
  helical interface sequence
EMLYAALLSFGLIFVGWGLGVLLLKI

SEQ ID NO: 1415 - protein, 12 aa, Artificial
  helical interface sequence
PETLHNVMWAMS

SEQ ID NO: 1416 - protein, 16 aa, Artificial
  helical interface sequence
PANARRLMDSIDSLKS

SEQ ID NO: 1417 - protein, 17 aa, Artificial
  helical interface sequence
ERLAKLNQLLRIEEELG

SEQ ID NO: 1418 - protein, 16 aa, Artificial
  helical interface sequence
DFEILEMAVRELAIEK

SEQ ID NO: 1419 - protein, 52 aa, Artificial; identical to SEQ ID NO: 499
  helical interface sequence

SEQ ID NO: 1420 - protein, 32 aa, Artificial
  helical interface sequence
PVEDYELTLKIEIVKERGANLLSRLYRYQDSQ

SEQ ID NO: 1421 - protein, 25 aa, Artificial
  helical interface sequence
DTNQAKCARDISHYLRFITYSLVAG

SEQ ID NO: 1422 - protein, 57 aa, Artificial; identical to SEQ ID NO: 679
  helical interface sequence

SEQ ID NO: 1423 - protein, 10 aa, Artificial
  helical interface sequence
ERELLESYID

SEQ ID NO: 1424 - protein, 31 aa, Artificial
  helical interface sequence
NKEQTCIMKCSEKFLKHSERVGQRFQEQNAA

SEQ ID NO: 1425 - protein, 19 aa, Artificial
  helical interface sequence
HHAATVSFMKHLDNEQKAR

SEQ ID NO: 1426 - protein, 53 aa, Artificial; identical to SEQ ID NO: 635
  helical interface sequence

SEQ ID NO: 1427 - protein, 27 aa, Artificial
  helical interface sequence
PELETWVETWAFSETIHSRSFTHIIRN

SEQ ID NO: 1428 - protein, 19 aa, Artificial
  helical interface sequence
DFPLRIARNTGIVLAEEVN

SEQ ID NO: 1429 - protein, 16 aa, Artificial
  helical interface sequence
KLPFQRLVREIAQDFK

SEQ ID NO: 1430 - protein, 48 aa, Artificial
  helical interface sequence
LEGEVNKIKSALLSTNKAVVSLSNGVSVLTSKVLDLKNYIDKQLLPIV

SEQ ID NO: 1431 - protein, 18 aa, Artificial
  helical interface sequence
KRAVRRLRTACERAKRTL

SEQ ID NO: 1432 - protein, 22 aa, Artificial
  helical interface sequence
PQGGLQNIATGKHNLEILTKRS

SEQ ID NO: 1433 - protein, 61 aa, Artificial; identical to SEQ ID NO: 454
  helical interface sequence

SEQ ID NO: 1434 - protein, 27 aa, Artificial
  helical interface sequence
GCRMKGLIDEVDQDFTSRINKLRDSLF

SEQ ID NO: 1435 - protein, 32 aa, Artificial; identical to SEQ ID NO: 1402
  helical interface sequence

SEQ ID NO: 1436 - protein, 9 aa, Artificial
  helical interface sequence
LEGLRKERG

SEQ ID NO: 1437 - protein, 8 aa, Artificial
  helical interface sequence
ARRTRTIG

SEQ ID NO: 1438 - protein, 43 aa, Artificial; identical to SEQ ID NO: 26
  helical interface sequence

SEQ ID NO: 1439 - protein, 11 aa, Artificial
  helical interface sequence
VNWVQQTLAAN

SEQ ID NO: 1440 - protein, 16 aa, Artificial
  helical interface sequence
THLQVMAKERFHAGWM

SEQ ID NO: 1441 - protein, 13 aa, Artificial
  helical interface sequence
ASLIMPFLDNQVN

SEQ ID NO: 1442 - protein, 9 aa, Artificial
  helical interface sequence
ALLRYLLDK

SEQ ID NO: 1443 - protein, 11 aa, Artificial
  helical interface sequence
YTDFVRLTVKH

SEQ ID NO: 1444 - protein, 16 aa, Artificial
  helical interface sequence
IWELNTFATCECLAWR

SEQ ID NO: 1445 - protein, 15 aa, Artificial
  helical interface sequence
SDAIERVIKHYEHEL

SEQ ID NO: 1446 - protein, 36 aa, Artificial
  helical interface sequence
NSNIPTNLRVLRSILENLRSKIQKLESDVSAQMEYC

SEQ ID NO: 1447 - protein, 16 aa, Artificial
  helical interface sequence
KTTLTAAITTVLAKTY

SEQ ID NO: 1448 - protein, 25 aa, Artificial
  helical interface sequence
GLRVFYYLVQDLKCLVFSLIGLHFK

SEQ ID NO: 1449 - protein, 26 aa, Artificial
  helical interface sequence
IAQLVWYAQWLVIWTVVLLYLRREDR

SEQ ID NO: 1450 - protein, 17 aa, Artificial
  helical interface sequence
WFEEYYKVGVALTRMRI

SEQ ID NO: 1451 - protein, 12 aa, Artificial
  helical interface sequence
KRILQAANEVIE

SEQ ID NO: 1452 - protein, 33 aa, Artificial
  helical interface sequence
KSELEALAVSAIREHRRLLWADQAVYEEWLRAS

SEQ ID NO: 1453 - protein, 39 aa, Artificial
  helical interface sequence
SFLKDFDREVEIRIKQIESDRQNLLKEVDNLYNIEILRL

SEQ ID NO: 1454 - protein, 22 aa, Artificial
  helical interface sequence
LGEFLKLDRERAKNKIAKETNN

SEQ ID NO: 1455 - protein, 25 aa, Artificial
  helical interface sequence
SDRMAACLRDMEIILRYVTYAVFAG

SEQ ID NO: 1456 - protein, 17 aa, Artificial
  helical interface sequence
LGQIMEGIAGKYAALSG

SEQ ID NO: 1457 - protein, 35 aa, Artificial
  helical interface sequence
DIVQQQNNLLRAIEAQQHLLQLTVWGIKQLQARIL

SEQ ID NO: 1458 - protein, 59 aa, Artificial; identical to SEQ ID NO: 1034
  helical interface sequence

SEQ ID NO: 1459 - protein, 8 aa, Artificial
  helical interface sequence
WLEAWRRD

SEQ ID NO: 1460 - protein, 19 aa, Artificial
  helical interface sequence
LSAMAFLFQEMISQLHRTC

SEQ ID NO: 1461 - protein, 9 aa, Artificial
  helical interface sequence
FEDLLDYYG

SEQ ID NO: 1462 - protein, 22 aa, Artificial
  helical interface sequence
VVRGIDTLQKKVASILLALTQM

SEQ ID NO: 1463 - protein, 31 aa, Artificial
  helical interface sequence
TSTFALTIVVGALFFERAFDQGADAIYEHIN

SEQ ID NO: 1464 - protein, 11 aa, Artificial
  helical interface sequence
KPAIRRLARRG

SEQ ID NO: 1465 - protein, 31 aa, Artificial; identical to SEQ ID NO: 797
  helical interface sequence

SEQ ID NO: 1466 - protein, 31 aa, Artificial; identical to SEQ ID NO: 930
  helical interface sequence

SEQ ID NO: 1467 - protein, 25 aa, Artificial
  helical interface sequence
SRRMAACLRDMEIILRYVTYAVFAG

SEQ ID NO: 1468 - protein, 24 aa, Artificial
  helical interface sequence
VLEYFISSHGARKGGADTALRTAD

SEQ ID NO: 1469 - protein, 23 aa, Artificial
  helical interface sequence
SAYGLLFLGAHFIWAFSLMFLFS

SEQ ID NO: 1470 - protein, 15 aa, Artificial
  helical interface sequence
QKILQTFLHALTEKY

SEQ ID NO: 1471 - protein, 8 aa, Artificial
  helical interface sequence
ILENLRSK

SEQ ID NO: 1472 - protein, 14 aa, Artificial
  helical interface sequence
FKEVANAVKISASL

SEQ ID NO: 1473 - protein, 14 aa, Artificial
  helical interface sequence
MRDVVFNYLHATAF

SEQ ID NO: 1474 - protein, 13 aa, Artificial
  helical interface sequence
PMEVMLRAVFMQQ

SEQ ID NO: 1475 - protein, 18 aa, Artificial
  helical interface sequence
AEASRVYEIIVESVVNEV

SEQ ID NO: 1476 - protein, 29 aa, Artificial
  helical interface sequence
GLIYEETRGVLKVFLENVIRDAVTYTEHA

SEQ ID NO: 1477 - protein, 29 aa, Artificial
  helical interface sequence
SKAMGIMNSFVNDIFERIASEASRLAHYN

SEQ ID NO: 1478 - protein, 19 aa, Artificial
  helical interface sequence
QGVLQATFEYQTMIAELAG

SEQ ID NO: 1479 - protein, 6 aa, Artificial
  helical interface sequence
WYDFLM

SEQ ID NO: 1480 - protein, 16 aa, Artificial
  helical interface sequence
FERAAELRDLLLELKA

SEQ ID NO: 1481 - protein, 22 aa, Artificial
  helical interface sequence
AQGALANIAVDKANLEIMTKRS

SEQ ID NO: 1482 - protein, 13 aa, Artificial
  helical interface sequence
NHAIVQTLVNSVN

SEQ ID NO: 1483 - protein, 16 aa, Artificial
  helical interface sequence
KTTLTAAITTVLAKTY

SEQ ID NO: 1484 - protein, 16 aa, Artificial
  helical interface sequence
KLPFQRLVREIAQDFK

SEQ ID NO: 1485 - protein, 15 aa, Artificial
  helical interface sequence
QVVIDQFISSGEQKW

SEQ ID NO: 1486 - protein, 21 aa, Artificial
  helical interface sequence
KKLLAYLKYIPEVSRSLATFL

SEQ ID NO: 1487 - protein, 16 aa, Artificial
  helical interface sequence
KLPFQRLVREIAQDFK

SEQ ID NO: 1488 - protein, 14 aa, Artificial
  helical interface sequence
LDTVELVMALEEEF

SEQ ID NO: 1489 - protein, 18 aa, Artificial
  helical interface sequence
EEEIEVFQKQLSDILDFI

SEQ ID NO: 1490 - protein, 19 aa, Artificial
  helical interface sequence
PQEFFFHAMGGREGLIDTA

SEQ ID NO: 1491 - protein, 16 aa, Artificial
  helical interface sequence
AEETRRMLHRAFDTLA

SEQ ID NO: 1492 - protein, 9 aa, Artificial
  helical interface sequence
ERELLESYI

SEQ ID NO: 1493 - protein, 25 aa, Artificial
  helical interface sequence
AAQITIWAFWLFFFGLIIYLRREDK

SEQ ID NO: 1494 - protein, 10 aa, Artificial
  helical interface sequence
RQKRFAERIL

SEQ ID NO: 1495 - protein, 25 aa, Artificial
  helical interface sequence
SRRMAACLRDMEIILRYVTYAVFAG

SEQ ID NO: 1496 - protein, 25 aa, Artificial
  helical interface sequence
QRGKDKCARDIGYYLRMVTYCLIAG

SEQ ID NO: 1497 - protein, 32 aa, Artificial
  helical interface sequence
DKFETAYKKLSELKKTINNRIKEYRDILARTE

SEQ ID NO: 1498 - protein, 27 aa, Artificial
  helical interface sequence
PVIVIINLITLAAALLHTKTWFELAPK

SEQ ID NO: 1499 - protein, 39 aa, Artificial
  helical interface sequence
SEIETRHSEIIKLENSIRELHDMFMDMAMLVESQGEMID

SEQ ID NO: 1500 - protein, 46 aa, Artificial
  helical interface sequence
LEEVRILEQIGVSHDAQIQELSEMWRVNQQFVTRLQQQLVDIRQTC

SEQ ID NO: 1501 - protein, 10 aa, Artificial
  helical interface sequence
DQVLNMLYWV

SEQ ID NO: 1502 - protein, 14 aa, Artificial
  helical interface sequence
AKNYGRAVYECLRG

SEQ ID NO: 1503 - protein, 64 aa, Artificial; identical to SEQ ID NO: 866
  helical interface sequence

SEQ ID NO: 1504 - protein, 11 aa, Artificial
  helical interface sequence
EKELFESYIEG

SEQ ID NO: 1505 - protein, 14 aa, Artificial
  helical interface sequence
LVPGAIILDTVLML

SEQ ID NO: 1506 - protein, 20 aa, Artificial
  helical interface sequence
PEFQGHVVRVMGGLDILINA

SEQ ID NO: 1507 - protein, 12 aa, Artificial
  helical interface sequence
SREIQTAVRLLL

SEQ ID NO: 1508 - protein, 29 aa, Artificial
  helical interface sequence
SKAMSIMNSFVNDVFERIAGEASRLAHYN

SEQ ID NO: 1509 - protein, 48 aa, Artificial
  helical interface sequence
QKQIANQFNKAISQIQESLTTTSTALGKLQDVVNQNAQALNTLVKQLS

SEQ ID NO: 1510 - protein, 36 aa, Artificial; identical to SEQ ID NO: 1446
  helical interface sequence

SEQ ID NO: 1511 - protein, 24 aa, Artificial
  helical interface sequence
YFIIKDVFALAVVLLVFFAIVGFM

SEQ ID NO: 1512 - protein, 9 aa, Artificial
  helical interface sequence
KKWIQKVID

SEQ ID NO: 1513 - protein, 17 aa, Artificial
  helical interface sequence
VEEFFHLQHYLDTATAP

SEQ ID NO: 1514 - protein, 32 aa, Artificial
  helical interface sequence
LQQQHQRLAQLLLILSHIRHMSNKGMEHLYSM

SEQ ID NO: 1515 - protein, 10 aa, Artificial
  helical interface sequence
LHRALQAWVT

SEQ ID NO: 1516 - protein, 29 aa, Artificial
  helical interface sequence
SKAMSIMNSFVNDVFERIAGEASRLAHYN

SEQ ID NO: 1517 - protein, 19 aa, Artificial
  helical interface sequence
NYSIIDKLGKIVDDLVLCM

SEQ ID NO: 1518 - protein, 11 aa, Artificial
  helical interface sequence
EKELFESYIEG

SEQ ID NO: 1519 - protein, 27 aa, Artificial
  helical interface sequence
LQPTRDLLCPWYEECDNITKVCQLHDS

SEQ ID NO: 1520 - protein, 19 aa, Artificial
  helical interface sequence
MNEFTTHILEVINAHMVLS

SEQ ID NO: 1521 - protein, 11 aa, Artificial
  helical interface sequence
RIKVREAAMRG

SEQ ID NO: 1522 - protein, 17 aa, Artificial
  helical interface sequence
VDETLRLVQAFQFTDKH

SEQ ID NO: 1523 - protein, 21 aa, Artificial
  helical interface sequence
NSGMHLMIGILAALEIRHKTG

SEQ ID NO: 1524 - protein, 15 aa, Artificial
  helical interface sequence
QQLTAMKVIQRNCAA

SEQ ID NO: 1525 - protein, 16 aa, Artificial
  helical interface sequence
AQVPLGAGIALACKYN

SEQ ID NO: 1526 - protein, 16 aa, Artificial
  helical interface sequence
ADEWESLQETLYWLAQ

SEQ ID NO: 1527 - protein, 24 aa, Artificial
  helical interface sequence
PERILLEAGKSIIRKIEELEKKLV

SEQ ID NO: 1528 - protein, 23 aa, Artificial
  helical interface sequence
TLVPVLILVAIGAFSLPILFRSQ

SEQ ID NO: 1529 - protein, 17 aa, Artificial
  helical interface sequence
RRKWQKTGHAVRAIGRL

SEQ ID NO: 1530 - protein, 32 aa, Artificial; identical to SEQ ID NO: 796
  helical interface sequence

SEQ ID NO: 1531 - protein, 15 aa, Artificial
  helical interface sequence
INSAARNIQHLLYGK

SEQ ID NO: 1532 - protein, 30 aa, Artificial; identical to SEQ ID NO: 567
  helical interface sequence

SEQ ID NO: 1533 - protein, 15 aa, Artificial
  helical interface sequence
DKKLSKLIEEMELLF

SEQ ID NO: 1534 - protein, 20 aa, Artificial
  helical interface sequence
AAYRMNAAQAMALRYVRELS

SEQ ID NO: 1535 - protein, 27 aa, Artificial
  helical interface sequence
GCRMKGLIDEVDQDFTSRINKLRDSLF

SEQ ID NO: 1536 - protein, 40 aa, Artificial
  helical interface sequence
RAQILDKATEYIQYMRRKNHTHQQDIDDLKRQNALLEQQV

SEQ ID NO: 1537 - protein, 11 aa, Artificial
  helical interface sequence
EDEFIRIMKKT

SEQ ID NO: 1538 - protein, 16 aa, Artificial
  helical interface sequence
KETEFLRLKRTRLGLE

SEQ ID NO: 1539 - protein, 23 aa, Artificial
  helical interface sequence
PLSQCLFWALVADLLTLTWIGGQ

SEQ ID NO: 1540 - protein, 20 aa, Artificial
  helical interface sequence
FEEFIMLMARLTWASHEKMH

SEQ ID NO: 1541 - protein, 20 aa, Artificial
  helical interface sequence
TADKLAYFNKANTEVAILCN

SEQ ID NO: 1542 - protein, 15 aa, Artificial
  helical interface sequence
QATINADLAHLAGQH

SEQ ID NO: 1543 - protein, 14 aa, Artificial
  helical interface sequence
AEDHRVWKDYVHTL

SEQ ID NO: 1544 - protein, 18 aa, Artificial
  helical interface sequence
MDDLLIRRLTDRNDKEAH

SEQ ID NO: 1545 - protein, 31 aa, Artificial
  helical interface sequence
MGRRQFMNLLAFGTVTGVALGALYPLVKYFI

SEQ ID NO: 1546 - protein, 24 aa, Artificial
  helical interface sequence
IDVLGWVALLVVFTWSIAMVVWGR

SEQ ID NO: 1547 - protein, 23 aa, Artificial
  helical interface sequence
AAVAVEFARLYAVELEHYEKLEG

SEQ ID NO: 1548 - protein, 18 aa, Artificial
  helical interface sequence
ELEKAMVALIDVFHQYSG

SEQ ID NO: 1549 - protein, 16 aa, Artificial
  helical interface sequence
KTTLTAAITTVLAKTY

SEQ ID NO: 1550 - protein, 11 aa, Artificial
  helical interface sequence
YRHLLLEDQRI

SEQ ID NO: 1551 - protein, 22 aa, Artificial
  helical interface sequence
PEYNISLGERRANAVKMYLQGK

SEQ ID NO: 1552 - protein, 26 aa, Artificial
  helical interface sequence
IESVHRWGWFFSLMVMVSASVGILLT

SEQ ID NO: 1553 - protein, 16 aa, Artificial
  helical interface sequence
AHCASSRQIISHWKNC

SEQ ID NO: 1554 - protein, 24 aa, Artificial
  helical interface sequence
NADISQSLLQTFIGRFRRIMDSSQ

SEQ ID NO: 1555 - protein, 35 aa, Artificial
  helical interface sequence
EEEQKKKALERSMYVLSELVETEKMYVDDLGQIVE

SEQ ID NO: 1556 - protein, 25 aa, Artificial
  helical interface sequence
SDRMAACLRDMEIILRYVTYAVFAG

SEQ ID NO: 1557 - protein, 19 aa, Artificial
  helical interface sequence
EAAFAELFQHFAPKVKGFL

SEQ ID NO: 1558 - protein, 22 aa, Artificial
  helical interface sequence
AADCQFWETWLGSQCRLHELRE

SEQ ID NO: 1559 - protein, 24 aa, Artificial
  helical interface sequence
YYRLRVVGLIVAAVLCVIGIIILL

SEQ ID NO: 1560 - protein, 36 aa, Artificial; identical to SEQ ID NO: 581
  helical interface sequence

SEQ ID NO: 1561 - protein, 9 aa, Artificial
  helical interface sequence
DRLRPLSYP

SEQ ID NO: 1562 - protein, 25 aa, Artificial
  helical interface sequence
YRTYNLMQDGQESYVQSLFDQFNER

SEQ ID NO: 1563 - protein, 44 aa, Artificial
  helical interface sequence
EVLKRKVIEKVQHIQLLQKNVRAQLVDMKRLEVDIDIKIRSCRG

SEQ ID NO: 1564 - protein, 63 aa, Artificial
  helical interface sequence
HTAFAAKAGLMRHTIGQAEQQAMSAQAFHQGESAAAFQGAHARFVAAAAKVNTLLDIAQANLG

SEQ ID NO: 1565 - protein, 15 aa, Artificial
  helical interface sequence
LHDLVDYYYFWKEDG

SEQ ID NO: 1566 - protein, 21 aa, Artificial
  helical interface sequence
PKDALLKAIENIRGMTSHYID

SEQ ID NO: 1567 - protein, 12 aa, Artificial
  helical interface sequence
FWERVRSILKSG

SEQ ID NO: 1568 - protein, 13 aa, Artificial
  helical interface sequence
YVEGWKKTFEEDF

SEQ ID NO: 1569 - protein, 36 aa, Artificial; identical to SEQ ID NO: 312
  helical interface sequence

SEQ ID NO: 1570 - protein, 20 aa, Artificial
  helical interface sequence
AQNVSSTLLYFNDILEKETG

SEQ ID NO: 1571 - protein, 34 aa, Artificial
  helical interface sequence
ENVRRVAFYRLFHCLHRDSSKIYTYLRILKCRLT

SEQ ID NO: 1572 - protein, 24 aa, Artificial
  helical interface sequence
KGFEKIGNDIQILKSSINIAIEKL

SEQ ID NO: 1573 - protein, 32 aa, Artificial; identical to SEQ ID NO: 825
  helical interface sequence

SEQ ID NO: 1574 - protein, 25 aa, Artificial
  helical interface sequence
SRRMAACLRDMEIILRYVTYAVFAG

SEQ ID NO: 1575 - protein, 29 aa, Artificial
  helical interface sequence
NDARELVVNCCTEFIHLISSEANEICNKS

SEQ ID NO: 1576 - protein, 17 aa, Artificial
  helical interface sequence
SHVLSKVCMYFTYKVRY

SEQ ID NO: 1577 - protein, 37 aa, Artificial
  helical interface sequence
NTILAHENTIQQLTDMHIMNSNKITQLKQKIAQLESH

SEQ ID NO: 1578 - protein, 45 aa, Artificial
  helical interface sequence
IIHLQRRINMQLQQLTLLQHNIKTQVSQILRVEVDIDVALRACKG

SEQ ID NO: 1579 - protein, 24 aa, Artificial
  helical interface sequence
ILRVAPPFVAFYLVYTWGTQEFEK

SEQ ID NO: 1580 - protein, 10 aa, Artificial
  helical interface sequence
VAEKQKLFQE

SEQ ID NO: 1581 - protein, 32 aa, Artificial
  helical interface sequence
STITNCATYETADHLRWLTHTAYRTRELANCY

SEQ ID NO: 1582 - protein, 15 aa, Artificial
  helical interface sequence
LGELPQGFARLSAIY

SEQ ID NO: 1583 - protein, 23 aa, Artificial
  helical interface sequence
PWPLTGALSALLMTSGLTMWFHF

SEQ ID NO: 1584 - protein, 13 aa, Artificial
  helical interface sequence
YAAKLLFQELMAM

SEQ ID NO: 1585 - protein, 13 aa, Artificial
  helical interface sequence
ELTLVRHYTGLSR

SEQ ID NO: 1586 - protein, 27 aa, Artificial
  helical interface sequence
IYEETRGVLKVFLENVIRDAVTYTEHA

SEQ ID NO: 1587 - protein, 16 aa, Artificial
  helical interface sequence
KRPYLLRSLYDWLVDN

SEQ ID NO: 1588 - protein, 18 aa, Artificial
  helical interface sequence
TTEAFEKMVSLLSVLLSM

SEQ ID NO: 1589 - protein, 14 aa, Artificial
  helical interface sequence
MWERVKSIIKSSLA

SEQ ID NO: 1590 - protein, 10 aa, Artificial
  helical interface sequence
WSKKNELFSN

SEQ ID NO: 1591 - protein, 16 aa, Artificial
  helical interface sequence
DWERLAFGLVAGCMAQ

SEQ ID NO: 1592 - protein, 13 aa, Artificial
  helical interface sequence
AEDHRVWKDYVHT

SEQ ID NO: 1593 - protein, 14 aa, Artificial
  helical interface sequence
LHDLVDYYYFWKED

SEQ ID NO: 1594 - protein, 10 aa, Artificial
  helical interface sequence
PRDAQHFTQR

SEQ ID NO: 1595 - protein, 33 aa, Artificial
  helical interface sequence
THDSSIRYLQEIYNSNNQKIVNLKEKVAQLEAQ

SEQ ID NO: 1596 - protein, 18 aa, Artificial
  helical interface sequence
VSAFALLFSEMVQYCQSR

SEQ ID NO: 1597 - protein, 38 aa, Artificial; identical to SEQ ID NO: 1298
  helical interface sequence

SEQ ID NO: 1598 - protein, 8 aa, Artificial
  helical interface sequence
KEDFRYRS

SEQ ID NO: 1599 - protein, 25 aa, Artificial
  helical interface sequence
SDRMAACLRDMEIILRYVTYAVFAG

SEQ ID NO: 1600 - protein, 31 aa, Artificial; identical to SEQ ID NO: 749
  helical interface sequence

SEQ ID NO: 1601 - protein, 9 aa, Artificial
  helical interface sequence
ERELLESYI

SEQ ID NO: 1602 - protein, 11 aa, Artificial
  helical interface sequence
IQEWLQLTMYS

SEQ ID NO: 1603 - protein, 33 aa, Artificial; identical to SEQ ID NO: 83
  helical interface sequence

SEQ ID NO: 1604 - protein, 9 aa, Artificial
  helical interface sequence
WLEAWRRDL

SEQ ID NO: 1605 - protein, 11 aa, Artificial
  helical interface sequence
EAERLRAYLEG

SEQ ID NO: 1606 - protein, 26 aa, Artificial
  helical interface sequence
ADKRRQYARIAIEELDRAEAIITDYL

SEQ ID NO: 1607 - protein, 21 aa, Artificial
  helical interface sequence
PGNRNMATFGMMDELRHGQLQ

SEQ ID NO: 1608 - protein, 18 aa, Artificial
  helical interface sequence
EEEIEVFQKQLSDILDFI

SEQ ID NO: 1609 - protein, 13 aa, Artificial
  helical interface sequence
EVASLLAWTHQMK

SEQ ID NO: 1610 - protein, 20 aa, Artificial
  helical interface sequence
AQNVSSTLLYFNDILEKETG

SEQ ID NO: 1611 - protein, 34 aa, Artificial
  helical interface sequence
RHSAEYYNKQYLERTRAELDTACRHNYEETEVPT

SEQ ID NO: 1612 - protein, 23 aa, Artificial
  helical interface sequence
ELIHLLGHSRHDWMNKLQLIKGN

SEQ ID NO: 1613 - protein, 9 aa, Artificial
  helical interface sequence
TQVKALYKS

SEQ ID NO: 1614 - protein, 34 aa, Artificial; identical to SEQ ID NO: 1100
  helical interface sequence

SEQ ID NO: 1615 - protein, 33 aa, Artificial; identical to SEQ ID NO: 602
  helical interface sequence

SEQ ID NO: 1616 - protein, 16 aa, Artificial
  helical interface sequence
IVGCIAAGILAILQGF

SEQ ID NO: 1617 - protein, 29 aa, Artificial
  helical interface sequence
PAHMIAISFFFTNALALALHGALVLSAAN

SEQ ID NO: 1618 - protein, 32 aa, Artificial
  helical interface sequence
AEQKNGYLAQVLDEIRHTHQCAFINHYYSKHY

SEQ ID NO: 1619 - protein, 42 aa, Artificial; identical to SEQ ID NO: 1000
  helical interface sequence

SEQ ID NO: 1620 - protein, 14 aa, Artificial
  helical interface sequence
FKEVANAVKISASL

SEQ ID NO: 1621 - protein, 16 aa, Artificial
  helical interface sequence
THLQVMAKERFHAGWM

SEQ ID NO: 1622 - protein, 12 aa, Artificial
  helical interface sequence
IDEKVELYRLKF

SEQ ID NO: 1623 - protein, 24 aa, Artificial
  helical interface sequence
NERTLDFHDSNVRNLYEKVKSQLK

SEQ ID NO: 1624 - protein, 12 aa, Artificial
  helical interface sequence
ATSLEREYLLLS

SEQ ID NO: 1625 - protein, 21 aa, Artificial
  helical interface sequence
ASTNAVIAAVCATEVFKIATS

SEQ ID NO: 1626 - protein, 28 aa, Artificial
  helical interface sequence
PGFAQLFFDAASEEREHAMKLIEYLLMR

SEQ ID NO: 1627 - protein, 28 aa, Artificial
  helical interface sequence
PGFAQLFFDAASEEREHAMKLIEYLLMR

SEQ ID NO: 1628 - protein, 28 aa, Artificial
  helical interface sequence
PGFAQLFFDAASEEREHAMKLIEYLLMR

SEQ ID NO: 1629 - protein, 28 aa, Artificial
  helical interface sequence
PGFAQLFFDAASEEREHAMKLIEYLLMR

SEQ ID NO: 1630 - protein, 16 aa, Artificial
  helical interface sequence
APSAFYGYGWAQARSH

SEQ ID NO: 1631 - protein, 31 aa, Artificial; identical to SEQ ID NO: 852
  helical interface sequence

SEQ ID NO: 1632 - protein, 6 aa, Artificial
  helical interface sequence
AFEMIT

SEQ ID NO: 1633 - protein, 26 aa, Artificial
  helical interface sequence
DMPPAFIKVENACTKLVQAAQMLQSD

SEQ ID NO: 1634 - protein, 15 aa, Artificial
  helical interface sequence
MKLELAQYREVAAFA

SEQ ID NO: 1635 - protein, 29 aa, Artificial
  helical interface sequence
PAHMIAISFFFTNALALALHGALVLSAAN

SEQ ID NO: 1636 - protein, 16 aa, Artificial
  helical interface sequence
KLPFQRLVREIAQDFK

SEQ ID NO: 1637 - protein, 29 aa, Artificial
  helical interface sequence
SSAVMALQEASEAYLVALFEDTNLCAIHA

SEQ ID NO: 1638 - protein, 8 aa, Artificial
  helical interface sequence
KEDFRYRS

SEQ ID NO: 1639 - protein, 24 aa, Artificial
  helical interface sequence
YFIIKDVFALAVVLLVFFAIVGFM

SEQ ID NO: 1640 - protein, 15 aa, Artificial
  helical interface sequence
FSQVLDDLSARFILN

SEQ ID NO: 1641 - protein, 16 aa, Artificial
  helical interface sequence
KLPFQRLVREIAQDFK

SEQ ID NO: 1642 - protein, 31 aa, Artificial
  helical interface sequence
KVKQLEDAVEELLSANYHLENAVARLKKLVG

SEQ ID NO: 1643 - protein, 18 aa, Artificial
  helical interface sequence
EEEIEVFQKQLSDILDFI

SEQ ID NO: 1644 - protein, 15 aa, Artificial
  helical interface sequence
PEVKRRIMLGTFALS

SEQ ID NO: 1645 - protein, 10 aa, Artificial
  helical interface sequence
EKELFESYIE

SEQ ID NO: 1646 - protein, 15 aa, Artificial
  helical interface sequence
VSDRAWALFRALDGK

SEQ ID NO: 1647 - protein, 29 aa, Artificial
  helical interface sequence
SKAMSIMNSFVNDVFERIAGEASRLAHYN

SEQ ID NO: 1648 - protein, 25 aa, Artificial
  helical interface sequence
QEMTATCLRDLDYYLRLITYGIVAG

SEQ ID NO: 1649 - protein, 9 aa, Artificial
  helical interface sequence
TERYSTAYY

SEQ ID NO: 1650 - protein, 9 aa, Artificial
  helical interface sequence
FAAEVAAMS

SEQ ID NO: 1651 - protein, 29 aa, Artificial
  helical interface sequence
SSAVMALQEASEAYLVALFEDTNLCAIHA

SEQ ID NO: 1652 - protein, 25 aa, Artificial
  helical interface sequence
AIGKAKCARDIGYYLRMVTYCLVVG

SEQ ID NO: 1653 - protein, 58 aa, Artificial
  helical interface sequence
RRIRRERNKMAAAKSRNRRRELTDTLQAETDQLEDEKSALQTEIANLLKEKEKLEFIL

SEQ ID NO: 1654 - protein, 12 aa, Artificial
  helical interface sequence
KPAIRRLARRGG

SEQ ID NO: 1655 - protein, 14 aa, Artificial
  helical interface sequence
DEQIAAQVDYIVAN

SEQ ID NO: 1656 - protein, 7 aa, Artificial
  helical interface sequence
LADVKSS

SEQ ID NO: 1657 - protein, 32 aa, Artificial
  helical interface sequence
VKQLKAKVEELKSKLWHLKNKVARLKKKNAEC

SEQ ID NO: 1658 - protein, 29 aa, Artificial
  helical interface sequence
KSQFLYVLIPAGIYWYWWKNGNEYNEFLY

SEQ ID NO: 1659 - protein, 26 aa, Artificial
  helical interface sequence
PYWRDEILNKYFGALLYSEYGLFNAH

SEQ ID NO: 1660 - protein, 45 aa, Artificial; identical to SEQ ID NO: 1578
  helical interface sequence

SEQ ID NO: 1661 - protein, 29 aa, Artificial
  helical interface sequence
PGHMSSVSFLFVNAMALGLHGGLILSVAN

SEQ ID NO: 1662 - protein, 23 aa, Artificial
  helical interface sequence
AGIAIELVRLFAVELEHYEKIEG

SEQ ID NO: 1663 - protein, 20 aa, Artificial
  helical interface sequence
WRDRFLFCAEALYKAQAETG

SEQ ID NO: 1664 - protein, 15 aa, Artificial
  helical interface sequence
FDFTHREFRKLWSEG

SEQ ID NO: 1665 - protein, 34 aa, Artificial
  helical interface sequence
DAEYYNKQYLERTRAELDTVCRYNYEETEVPTSL

SEQ ID NO: 1666 - protein, 16 aa, Artificial
  helical interface sequence
FASAVRILEVVKDKAG

SEQ ID NO: 1667 - protein, 19 aa, Artificial
  helical interface sequence
TLDEAERQWKAEFHRWSSY

SEQ ID NO: 1668 - protein, 10 aa, Artificial
  helical interface sequence
KILHRLLQEG

SEQ ID NO: 1669 - protein, 19 aa, Artificial
  helical interface sequence
DENSIELARVVDRGIRESE

SEQ ID NO: 1670 - protein, 13 aa, Artificial
  helical interface sequence
RACQRFIHRRAQF

SEQ ID NO: 1671 - protein, 14 aa, Artificial
  helical interface sequence
AEDHRVWKDYVHTL

SEQ ID NO: 1672 - protein, 28 aa, Artificial
  helical interface sequence
RVLRSILENLRSKIQKLESDVSAQMEYC

SEQ ID NO: 1673 - protein, 10 aa, Artificial
  helical interface sequence
VIYHFKHYTE

SEQ ID NO: 1674 - protein, 31 aa, Artificial
  helical interface sequence
RDELMEAIQKQEEINFRLQDYIDRIIVAIME

SEQ ID NO: 1675 - protein, 16 aa, Artificial
  helical interface sequence
KNLLDLTCQTVADMIK

SEQ ID NO: 1676 - protein, 15 aa, Artificial
  helical interface sequence
SSVSLGGIVKYSEQF

SEQ ID NO: 1677 - protein, 46 aa, Artificial; identical to SEQ ID NO: 309
  helical interface sequence

SEQ ID NO: 1678 - protein, 27 aa, Artificial
  helical interface sequence
LEQSERRRRLLELQKSKRLDYVNHARR

SEQ ID NO: 1679 - protein, 14 aa, Artificial
  helical interface sequence
YSDIAIGIEQAILG

SEQ ID NO: 1680 - protein, 12 aa, Artificial
  helical interface sequence
FPEFLTMMARKM

SEQ ID NO: 1681 - protein, 29 aa, Artificial
  helical interface sequence
SKAMSIMNSFVNDVFERIAGEASRLAHYN

SEQ ID NO: 1682 - protein, 28 aa, Artificial
  helical interface sequence
SQEEQCLSNCVNRFLDTNIRIVNGLQNT

SEQ ID NO: 1683 - protein, 11 aa, Artificial
  helical interface sequence
RQFDWAWRAYH

SEQ ID NO: 1684 - protein, 24 aa, Artificial
  helical interface sequence
TIVPIVILVAIGAFSLPVLFNQQE

SEQ ID NO: 1685 - protein, 11 aa, Artificial
  helical interface sequence
AADLRRLRGAV

SEQ ID NO: 1686 - protein, 25 aa, Artificial
  helical interface sequence
QTGKDKCVRDIGYYLRMVTYCLVVG

SEQ ID NO: 1687 - protein, 9 aa, Artificial
  helical interface sequence
ERELLESYI

SEQ ID NO: 1688 - protein, 16 aa, Artificial
  helical interface sequence
KLPFQRLVREIAQDFK

SEQ ID NO: 1689 - protein, 47 aa, Artificial
  helical interface sequence
EGEVNKIKSALLSTNKAVVSLSNGVSVLTSKVLDLKNYIDKQLLPIV

SEQ ID NO: 1690 - protein, 36 aa, Artificial
  helical interface sequence
PQEFFFHAMGGREGLIDTAVKTAETGYIQRRLVKAL

SEQ ID NO: 1691 - protein, 27 aa, Artificial
  helical interface sequence
VDQVVVRGIDTLQKKVASILLALTQMD

SEQ ID NO: 1692 - protein, 20 aa, Artificial
  helical interface sequence
WRDRFLFVAEAIYKAQAETG

SEQ ID NO: 1693 - protein, 53 aa, Artificial
  helical interface sequence
TRLNMINNKIDDQIQDIWTYNAELLVLLENQKTLDEHDANVNNLYNKVKRALG

SEQ ID NO: 1694 - protein, 31 aa, Artificial; identical to SEQ ID NO: 797
  helical interface sequence

SEQ ID NO: 1695 - protein, 21 aa, Artificial
  helical interface sequence
AKEYARMEAVKDERQFGSLQV

SEQ ID NO: 1696 - protein, 32 aa, Artificial; identical to SEQ ID NO: 796
  helical interface sequence

SEQ ID NO: 1697 - protein, 21 aa, Artificial
  helical interface sequence
AKEYARMEAVKDERQFGSLQV

SEQ ID NO: 1698 - protein, 17 aa, Artificial
  helical interface sequence
EQTLQDLKNIWQKKLTE

SEQ ID NO: 1699 - protein, 19 aa, Artificial
  helical interface sequence
NPDVQAAKNKLKAGYLMSV

SEQ ID NO: 1700 - protein, 14 aa, Artificial
  helical interface sequence
ISEQAAKIIQIINE

SEQ ID NO: 1701 - protein, 29 aa, Artificial
  helical interface sequence
MTLSISVLLSLTVFLLVIVELIPSTSSAV

SEQ ID NO: 1702 - protein, 11 aa, Artificial
  helical interface sequence
KILHRLLQEGS

SEQ ID NO: 1703 - protein, 33 aa, Artificial
  helical interface sequence
PRSAVIFGKILGILTEIRTLGMQNSNMCISLKL

SEQ ID NO: 1704 - protein, 28 aa, Artificial
  helical interface sequence
PEFLEQKRAEVDTVCRHNYEIFDNFLVP

SEQ ID NO: 1705 - protein, 59 aa, Artificial
  helical interface sequence
NEMDENLEQVSGIIGNLRHMALDMGNEIDTQNRQIDRIMEKADSNKTRIDEANQRATKM

SEQ ID NO: 1706 - protein, 25 aa, Artificial
  helical interface sequence
YRTYNLLQDGQESYVQGLFDQLNDR

SEQ ID NO: 1707 - protein, 10 aa, Artificial
  helical interface sequence
EKELFESYIE

SEQ ID NO: 1708 - protein, 30 aa, Artificial; identical to SEQ ID NO: 1413
  helical interface sequence

SEQ ID NO: 1709 - protein, 34 aa, Artificial
  helical interface sequence
GIEAAASAIQGNVTSIHSLLDEGKQSLTKLAAAW

SEQ ID NO: 1710 - protein, 17 aa, Artificial
  helical interface sequence
FEEFIMLMARLTWASHE

SEQ ID NO: 1711 - protein, 36 aa, Artificial
  helical interface sequence
PTWKMIHSVLTLFVAVPSLMTAFTVAASLEFAGRLR

SEQ ID NO: 1712 - protein, 22 aa, Artificial
  helical interface sequence
RLTQLQICLDQMTEQFCATLNY

SEQ ID NO: 1713 - protein, 19 aa, Artificial
  helical interface sequence
EKRIKELELLLMSTENELK

SEQ ID NO: 1714 - protein, 22 aa, Artificial
  helical interface sequence
EEERLVCSREIFDTYIMKELLA

SEQ ID NO: 1715 - protein, 27 aa, Artificial
  helical interface sequence
YFVVNVIIPCLLFSFLTVLVFYLPTDS

SEQ ID NO: 1716 - protein, 13 aa, Artificial
  helical interface sequence
AEDHRVWKDYVHT

SEQ ID NO: 1717 - protein, 22 aa, Artificial
  helical interface sequence
EADKLNKEVEDLTASLFDEANN

SEQ ID NO: 1718 - protein, 8 aa, Artificial
  helical interface sequence
LNNIVKCQ

SEQ ID NO: 1719 - protein, 12 aa, Artificial
  helical interface sequence
PDLRDRGYIYWR

SEQ ID NO: 1720 - protein, 17 aa, Artificial
  helical interface sequence
WDDMEKIWHHTFYNELR

SEQ ID NO: 1721 - protein, 23 aa, Artificial
  helical interface sequence
VADARVLVDFARISAQQEKVTYG

SEQ ID NO: 1722 - protein, 18 aa, Artificial
  helical interface sequence
QDESGAAAIFTVQLDDYL

SEQ ID NO: 1723 - protein, 19 aa, Artificial
  helical interface sequence
FRNTLHFHIKASKAYMHQR

SEQ ID NO: 1724 - protein, 42 aa, Artificial; identical to SEQ ID NO: 284
  helical interface sequence

SEQ ID NO: 1725 - protein, 20 aa, Artificial
  helical interface sequence
YAGTLQSLGADIASEQAVLS

SEQ ID NO: 1726 - protein, 10 aa, Artificial
  helical interface sequence
AHLPPLCEEK

SEQ ID NO: 1727 - protein, 29 aa, Artificial
  helical interface sequence
CILRVAPPFVAFYLVYTWGTQEFEKSKRK

SEQ ID NO: 1728 - protein, 21 aa, Artificial
  helical interface sequence
TDVIIAFQAQCRGYLARKAFA

SEQ ID NO: 1729 - protein, 12 aa, Artificial
  helical interface sequence
ESLIKYKKTLLG

SEQ ID NO: 1730 - protein, 19 aa, Artificial
  helical interface sequence
DFSARIARNTQLFLQQESG

SEQ ID NO: 1731 - protein, 29 aa, Artificial
  helical interface sequence
SKAMGIMNSFVNDIFERIAGEASRLAHYN

SEQ ID NO: 1732 - protein, 8 aa, Artificial
  helical interface sequence
IKPIQRVL

SEQ ID NO: 1733 - protein, 25 aa, Artificial
  helical interface sequence
SRRMAACLRDMEIILRYVTYAVFAG

SEQ ID NO: 1734 - protein, 25 aa, Artificial
  helical interface sequence
QRGKDKCARDIGYYLRMVTYCLIAG

SEQ ID NO: 1735 - protein, 12 aa, Artificial
  helical interface sequence
AEQVIASFRILA

SEQ ID NO: 1736 - protein, 12 aa, Artificial
  helical interface sequence
MYDANMVKAAVL

SEQ ID NO: 1737 - protein, 14 aa, Artificial
  helical interface sequence
PWSKAFLASAYASR

SEQ ID NO: 1738 - protein, 39 aa, Artificial
  helical interface sequence
ASRKLQLKTLLLQIAKQELEREAEERRGEKGRALSTRAQ

SEQ ID NO: 1739 - protein, 33 aa, Artificial
  helical interface sequence
QQWEEEIEQHEGNLSLLLREAALQVHIAQRDAR

SEQ ID NO: 1740 - protein, 66 aa, Artificial; identical to SEQ ID NO: 657
  helical interface sequence

SEQ ID NO: 1741 - protein, 70 aa, Artificial
  helical interface sequence
LEEMQRRADQLADESLESTRRMLQLVEESKDAGIRTLVMLDEQGEQLDRVEEGMNHINQDMKEAEKNLKD

SEQ ID NO: 1742 - protein, 10 aa, Artificial
  helical interface sequence
VFTWSLPFVG

SEQ ID NO: 1743 - protein, 20 aa, Artificial
  helical interface sequence
VNVFLRTDAALGTVLMEIRN

SEQ ID NO: 1744 - protein, 25 aa, Artificial
  helical interface sequence
HAPYVKDKAEEWRYTDRFLQGYSAD

SEQ ID NO: 1745 - protein, 21 aa, Artificial
  helical interface sequence
PQEFFFHAMGGREGLIDTAVK

SEQ ID NO: 1746 - protein, 23 aa, Artificial
  helical interface sequence
PWPLTGALSALLMTSGLTMWFHF

SEQ ID NO: 1747 - protein, 23 aa, Artificial
  helical interface sequence
PWPLTGALSALLMTSGLTMWFHF

SEQ ID NO: 1748 - protein, 25 aa, Artificial
  helical interface sequence
NRRMAACLRDGEIILRYVSYALLSG

SEQ ID NO: 1749 - protein, 13 aa, Artificial
  helical interface sequence
MNEFTTHILEVIN

SEQ ID NO: 1750 - protein, 20 aa, Artificial
  helical interface sequence
WRDRFLFCAEALYKAQAETG

SEQ ID NO: 1751 - protein, 37 aa, Artificial; identical to SEQ ID NO: 288
  helical interface sequence

SEQ ID NO: 1752 - protein, 12 aa, Artificial
  helical interface sequence
NCFMGCMDEHEL

SEQ ID NO: 1753 - protein, 17 aa, Artificial
  helical interface sequence
FAVAEKRKKAYADFYRN

SEQ ID NO: 1754 - protein, 8 aa, Artificial
  helical interface sequence
TDTQISRL

SEQ ID NO: 1755 - protein, 16 aa, Artificial
  helical interface sequence
KLPFQRLVREIAQDFK

SEQ ID NO: 1756 - protein, 19 aa, Artificial
  helical interface sequence
SVLAGHSRTVSDSIKKLIT

SEQ ID NO: 1757 - protein, 14 aa, Artificial
  helical interface sequence
LHDLVDYYHFWKED

SEQ ID NO: 1758 - protein, 48 aa, Artificial
  helical interface sequence
AQECQNLEVERQRRLERIKQKQSQLQELILQQIAFKNLVQRNRHAEQQ

SEQ ID NO: 1759 - protein, 19 aa, Artificial
  helical interface sequence
PQEFFFHAMGGREGLIDTA

SEQ ID NO: 1760 - protein, 10 aa, Artificial
  helical interface sequence
WSKKNELFSN

SEQ ID NO: 1761 - protein, 10 aa, Artificial
  helical interface sequence
PNYRRRLVRW

SEQ ID NO: 1762 - protein, 5 aa, Artificial
  helical interface sequence
WWRLF

SEQ ID NO: 1763 - protein, 22 aa, Artificial
  helical interface sequence
PEYNISLGERRANAVKMYLQGK

SEQ ID NO: 1764 - protein, 6 aa, Artificial
  helical interface sequence
DEFLLD

SEQ ID NO: 1765 - protein, 15 aa, Artificial
  helical interface sequence
QLRRIGDKVNLRQKL

SEQ ID NO: 1766 - protein, 16 aa, Artificial
  helical interface sequence
KLPFQRLVREIAQDFK

SEQ ID NO: 1767 - protein, 20 aa, Artificial
  helical interface sequence
ELAKHAVSEGTKAVTKYTSS

SEQ ID NO: 1768 - protein, 8 aa, Artificial
  helical interface sequence
RYWRILAE

SEQ ID NO: 1769 - protein, 12 aa, Artificial
  helical interface sequence
STAIREISLMKE

SEQ ID NO: 1770 - protein, 30 aa, Artificial
  helical interface sequence
SAEDKKFLEVERALKEAALNPLRHATEELF

SEQ ID NO: 1771 - protein, 26 aa, Artificial
  helical interface sequence
WGDFAAAAVMSALPITIVFLLAQRWL

SEQ ID NO: 1772 - protein, 17 aa, Artificial
  helical interface sequence
ATIISSVLQTILYHIEY

SEQ ID NO: 1773 - protein, 20 aa, Artificial
  helical interface sequence
KVTAMKCFLLELQVISLESG

SEQ ID NO: 1774 - protein, 13 aa, Artificial
  helical interface sequence
QRALAVRAYAEKV

SEQ ID NO: 1775 - protein, 15 aa, Artificial
  helical interface sequence
PVRVAEEACLLDQMS

SEQ ID NO: 1776 - protein, 21 aa, Artificial
  helical interface sequence
PGNRNMATFGMMDELRHGQLQ

SEQ ID NO: 1777 - protein, 13 aa, Artificial
  helical interface sequence
IFEMYARTRDEGF

SEQ ID NO: 1778 - protein, 15 aa, Artificial
  helical interface sequence
PEVKRRIMLGTFALS

SEQ ID NO: 1779 - protein, 18 aa, Artificial
  helical interface sequence
PFTQNLGKFAVDEENKIG

SEQ ID NO: 1780 - protein, 36 aa, Artificial; identical to SEQ ID NO: 312
  helical interface sequence

SEQ ID NO: 1781 - protein, 24 aa, Artificial
  helical interface sequence
QTGKDKCVRDIGYYLRMVTYCLVV

SEQ ID NO: 1782 - protein, 32 aa, Artificial
  helical interface sequence
ANATYIRNLVLGNQFMHDHLVHFYHLHALDFV

SEQ ID NO: 1783 - protein, 27 aa, Artificial
  helical interface sequence
STEIQVAFGRFRQAKAGLEAAKALTSK

SEQ ID NO: 1784 - protein, 20 aa, Artificial
  helical interface sequence
EFTADVTIWEEGSEFVERLT

SEQ ID NO: 1785 - protein, 11 aa, Artificial
  helical interface sequence
LDQVLNMLYWV

SEQ ID NO: 1786 - protein, 21 aa, Artificial
  helical interface sequence
PQGGLQNIAVVKHNLGVLTKR

SEQ ID NO: 1787 - protein, 23 aa, Artificial
  helical interface sequence
SVLEHLRAKMQRMEEAIKTQKEL

SEQ ID NO: 1788 - protein, 16 aa, Artificial
  helical interface sequence
DTQLQQIVDKTIINAD

SEQ ID NO: 1789 - protein, 39 aa, Artificial
  helical interface sequence
EQIGVSHDAQIQELSEMWRVNQQFVTRLQQQLVDIRQTC

SEQ ID NO: 1790 - protein, 16 aa, Artificial
  helical interface sequence
VEECTEFEIQNVIASV

SEQ ID NO: 1791 - protein, 15 aa, Artificial
  helical interface sequence
MNEFTTHILEVINAH

SEQ ID NO: 1792 - protein, 16 aa, Artificial
  helical interface sequence
TIGNSLVDALDTLISD

SEQ ID NO: 1793 - protein, 48 aa, Artificial
  helical interface sequence
RMRNRIAASKCRKRKLERIARLEEKVKTLKAQNSELASTANMLREQVA

SEQ ID NO: 1794 - protein, 22 aa, Artificial
  helical interface sequence
GNAVLASGATFCVAVWVYMATQ

SEQ ID NO: 1795 - protein, 28 aa, Artificial
  helical interface sequence
KWRLLAMMTLFFGSGFAAPFFIVRHQLL

SEQ ID NO: 1796 - protein, 15 aa, Artificial
  helical interface sequence
TALGVIRSLWKDSLA

SEQ ID NO: 1797 - protein, 20 aa, Artificial
  helical interface sequence
FQEFLILVIKMGVAAHKKSH

SEQ ID NO: 1798 - protein, 19 aa, Artificial
  helical interface sequence
FEEFIMLMARLTWASHEKM

SEQ ID NO: 1799 - protein, 14 aa, Artificial
  helical interface sequence
VTLLRSLMQQALAW

SEQ ID NO: 1800 - protein, 29 aa, Artificial
  helical interface sequence
RFAKLLLRLPALRSIGLKCLEHLFFFKLI

SEQ ID NO: 1801 - protein, 12 aa, Artificial
  helical interface sequence
PETLHNVMWAMS

SEQ ID NO: 1802 - protein, 16 aa, Artificial
  helical interface sequence
YRLTVVVAKRAQQLLR

SEQ ID NO: 1803 - protein, 5 aa, Artificial
  helical interface sequence
LIRER

SEQ ID NO: 1804 - protein, 16 aa, Artificial
  helical interface sequence
LEEYNSLEETAYLLRS

SEQ ID NO: 1805 - protein, 13 aa, Artificial
  helical interface sequence
RACQRFIHRRAQF

SEQ ID NO: 1806 - protein, 18 aa, Artificial
  helical interface sequence
LTELHNKIVEMRERVASG

SEQ ID NO: 1807 - protein, 36 aa, Artificial
  helical interface sequence
ILTHDSSIRYLQEIYNSNNQKIVNLKEKVAQLEAQC

SEQ ID NO: 1808 - protein, 11 aa, Artificial
  helical interface sequence
ELGRPDAEYWN

SEQ ID NO: 1809 - protein, 16 aa, Artificial
  helical interface sequence
RFETKALADAKAALEA

SEQ ID NO: 1810 - protein, 15 aa, Artificial
  helical interface sequence
DEIINFYMNMLMERS

SEQ ID NO: 1811 - protein, 8 aa, Artificial
  helical interface sequence
LERYLQLC

SEQ ID NO: 1812 - protein, 27 aa, Artificial
  helical interface sequence
PFHGLSIAFLYGSALLFAMHGATILAV

SEQ ID NO: 1813 - protein, 8 aa, Artificial
  helical interface sequence
TLKFWDIF

SEQ ID NO: 1814 - protein, 9 aa, Artificial
  helical interface sequence
TLKFWDIFR

SEQ ID NO: 1815 - protein, 31 aa, Artificial; identical to SEQ ID NO: 852
  helical interface sequence

SEQ ID NO: 1816 - protein, 24 aa, Artificial
  helical interface sequence
YFIIKDVFALAVVLLVFFAIVGFM

SEQ ID NO: 1817 - protein, 25 aa, Artificial
  helical interface sequence
QRGKDKCARDIGYYLRMVTYCLIAG

SEQ ID NO: 1818 - protein, 16 aa, Artificial
  helical interface sequence
VSRLLRVMQCLSRIEE

SEQ ID NO: 1819 - protein, 19 aa, Artificial
  helical interface sequence
FYTKNLLLNEGIRAWMAPQ

SEQ ID NO: 1820 - protein, 8 aa, Artificial
  helical interface sequence
VHWYVGEG

SEQ ID NO: 1821 - protein, 85 aa, Artificial; identical to SEQ ID NO: 1067
  helical interface sequence

SEQ ID NO: 1822 - protein, 58 aa, Artificial
  helical interface sequence
FAAKAGLMRHTIGQAEQQAMSAQAFHQGESAAAFQGAHARFVAAAAKVNTLLDIAQAN

SEQ ID NO: 1823 - protein, 6 aa, Artificial
  helical interface sequence
INEVIH

SEQ ID NO: 1824 - protein, 11 aa, Artificial
  helical interface sequence
EMERDCMIAHG

SEQ ID NO: 1825 - protein, 25 aa, Artificial
  helical interface sequence
SRRMAACLRDMEIILRYVTYAIFAG

SEQ ID NO: 1826 - protein, 16 aa, Artificial
  helical interface sequence
DRLAMNFERAAELTAV

SEQ ID NO: 1827 - protein, 9 aa, Artificial
  helical interface sequence
TQVKALYKS

SEQ ID NO: 1828 - protein, 19 aa, Artificial
  helical interface sequence
VYNNVVRTCIEAMAATQGH

SEQ ID NO: 1829 - protein, 6 aa, Artificial
  helical interface sequence
DFVAKD

SEQ ID NO: 1830 - protein, 5 aa, Artificial
  helical interface sequence
PLVKG

SEQ ID NO: 1831 - protein, 22 aa, Artificial
  helical interface sequence
AQGALANIAVNKANLDVMKERS

SEQ ID NO: 1832 - protein, 25 aa, Artificial
  helical interface sequence
ALKPLAAAGFIATFAGLIFHYIGIG

SEQ ID NO: 1833 - protein, 11 aa, Artificial
  helical interface sequence
ERAALFWRWTM

SEQ ID NO: 1834 - protein, 7 aa, Artificial
  helical interface sequence
EEEVEEL

SEQ ID NO: 1835 - protein, 12 aa, Artificial
  helical interface sequence
FKEVANAVKISA

SEQ ID NO: 1836 - protein, 18 aa, Artificial
  helical interface sequence
VEECTEFEIQNVIASVTH

SEQ ID NO: 1837 - protein, 12 aa, Artificial
  helical interface sequence
AERAALFWRWTM

SEQ ID NO: 1838 - protein, 20 aa, Artificial
  helical interface sequence
WRDRFLFCAEALYKAQAETG

SEQ ID NO: 1839 - protein, 20 aa, Artificial
  helical interface sequence
QLRQEAEQLKNQIRDARKAC

SEQ ID NO: 1840 - protein, 17 aa, Artificial
  helical interface sequence
HHTAEELREQVTDVLEN

SEQ ID NO: 1841 - protein, 11 aa, Artificial
  helical interface sequence
IGYEIGSKLAA

SEQ ID NO: 1842 - protein, 32 aa, Artificial; identical to SEQ ID NO: 1080
  helical interface sequence

SEQ ID NO: 1843 - protein, 5 aa, Artificial
  helical interface sequence
LYQLE

SEQ ID NO: 1844 - protein, 15 aa, Artificial
  helical interface sequence
VRELLPILEQVAQTG

SEQ ID NO: 1845 - protein, 19 aa, Artificial
  helical interface sequence
EERKLYDSALSKIEKLIET

SEQ ID NO: 1846 - protein, 32 aa, Artificial; identical to SEQ ID NO: 353
  helical interface sequence

SEQ ID NO: 1847 - protein, 16 aa, Artificial
  helical interface sequence
RRSIEISKVSKEAFEA

SEQ ID NO: 1848 - protein, 13 aa, Artificial
  helical interface sequence
KWVQDSMDHLDKQ

SEQ ID NO: 1849 - protein, 25 aa, Artificial
  helical interface sequence
PEELAFAREFMANTESYLKNVALKH

SEQ ID NO: 1850 - protein, 29 aa, Artificial
  helical interface sequence
GLIYEETRGVLKVFLENVIRDAVTYTEHA

SEQ ID NO: 1851 - protein, 22 aa, Artificial
  helical interface sequence
FNEFDNLRRGGIQFADTRGYAY

SEQ ID NO: 1852 - protein, 14 aa, Artificial
  helical interface sequence
KLPFQRLVREIAQD

SEQ ID NO: 1853 - protein, 9 aa, Artificial
  helical interface sequence
TEEILAMIK

SEQ ID NO: 1854 - protein, 30 aa, Artificial; identical to SEQ ID NO: 1386
  helical interface sequence

SEQ ID NO: 1855 - protein, 6 aa, Artificial
  helical interface sequence
DEFLLD

SEQ ID NO: 1856 - protein, 12 aa, Artificial
  helical interface sequence
AEHENQYFRDVV

SEQ ID NO: 1857 - protein, 22 aa, Artificial
  helical interface sequence
EMERGLFQTGQKGLNDFQCWEK

SEQ ID NO: 1858 - protein, 15 aa, Artificial
  helical interface sequence
IITTVLQVISNVIDY

SEQ ID NO: 1859 - protein, 25 aa, Artificial
  helical interface sequence
SDRMAACLRDMEIILRYVTYAVFAG

SEQ ID NO: 1860 - protein, 15 aa, Artificial
  helical interface sequence
ITHIREMCDIADKYC

SEQ ID NO: 1861 - protein, 25 aa, Artificial
  helical interface sequence
NRRMAACLRDMEIILRYVSYALLAG

SEQ ID NO: 1862 - protein, 8 aa, Artificial
  helical interface sequence
YCCRRMLL

SEQ ID NO: 1863 - protein, 12 aa, Artificial
  helical interface sequence
MRHILLVADVMT

SEQ ID NO: 1864 - protein, 35 aa, Artificial; identical to SEQ ID NO: 1457
  helical interface sequence

SEQ ID NO: 1865 - protein, 8 aa, Artificial
  helical interface sequence
ATCFVWFN

SEQ ID NO: 1866 - protein, 17 aa, Artificial
  helical interface sequence
SQLIFNAQALKDRYEGN

SEQ ID NO: 1867 - protein, 24 aa, Artificial
  helical interface sequence
RTSLYLGLLLILVLALLFSSYFFN

SEQ ID NO: 1868 - protein, 10 aa, Artificial
  helical interface sequence
LDALWDCLTG

SEQ ID NO: 1869 - protein, 8 aa, Artificial
  helical interface sequence
LISWLSFS

SEQ ID NO: 1870 - protein, 30 aa, Artificial; identical to SEQ ID NO: 702
  helical interface sequence

SEQ ID NO: 1871 - protein, 17 aa, Artificial
  helical interface sequence
AQVPLGAGIALACKYNG

SEQ ID NO: 1872 - protein, 19 aa, Artificial
  helical interface sequence
YLKAQKVRRLITNDFLKAF

SEQ ID NO: 1873 - protein, 13 aa, Artificial
  helical interface sequence
YVEGWKKTFEEDF

SEQ ID NO: 1874 - protein, 16 aa, Artificial
  helical interface sequence
KLPFQRLVREIAQDFK

SEQ ID NO: 1875 - protein, 25 aa, Artificial
  helical interface sequence
QEMTATCLRDLDYYLRLITYGIVAG

SEQ ID NO: 1876 - protein, 25 aa, Artificial
  helical interface sequence
TRRYAACIRDLDYYLRYATYAMLAG

SEQ ID NO: 1877 - protein, 25 aa, Artificial
  helical interface sequence
QEKINKCYRDIDHYMRLVNYSLVIG

SEQ ID NO: 1878 - protein, 20 aa, Artificial
  helical interface sequence
VNYFLDGERQLGTRLMELRN

SEQ ID NO: 1879 - protein, 25 aa, Artificial
  helical interface sequence
SRRMAACLRDMEIILRYVTYAVFAG

SEQ ID NO: 1880 - protein, 15 aa, Artificial
  helical interface sequence
SSTLFSALLIKCLEK

SEQ ID NO: 1881 - protein, 39 aa, Artificial; identical to SEQ ID NO: 1499
  helical interface sequence

SEQ ID NO: 1882 - protein, 27 aa, Artificial
  helical interface sequence
PFHGLSIAFLYGSALLFAMHGATILAV

SEQ ID NO: 1883 - protein, 20 aa, Artificial
  helical interface sequence
VNYFLDGERQLGTRLMELRN

SEQ ID NO: 1884 - protein, 12 aa, Artificial
  helical interface sequence
RACQQWIRQQLA

SEQ ID NO: 1885 - protein, 19 aa, Artificial
  helical interface sequence
PQRAIAWWGIRMVRDLNMN

SEQ ID NO: 1886 - protein, 8 aa, Artificial
  helical interface sequence
DNRYIRAV

SEQ ID NO: 1887 - protein, 14 aa, Artificial
  helical interface sequence
YSWIINGIEWAIAN

SEQ ID NO: 1888 - protein, 12 aa, Artificial
  helical interface sequence
PKVLQRLIKSRH

SEQ ID NO: 1889 - protein, 5 aa, Artificial
  helical interface sequence
LRYRS

SEQ ID NO: 1890 - protein, 24 aa, Artificial
  helical interface sequence
TILPAIILILIALPSLRILYMMDE

SEQ ID NO: 1891 - protein, 19 aa, Artificial
  helical interface sequence
TLDEAERQWKAEFHRWSSY

SEQ ID NO: 1892 - protein, 19 aa, Artificial
  helical interface sequence
TALGVIRSLWKDSLAKTDK

SEQ ID NO: 1893 - protein, 18 aa, Artificial
  helical interface sequence
QDEIDDLKDVFELFDFWD

SEQ ID NO: 1894 - protein, 9 aa, Artificial
  helical interface sequence
DTFWDYVSL

SEQ ID NO: 1895 - protein, 9 aa, Artificial
  helical interface sequence
ALLRYLLDK

SEQ ID NO: 1896 - protein, 9 aa, Artificial
  helical interface sequence
FRRIMDSSQ

SEQ ID NO: 1897 - protein, 14 aa, Artificial
  helical interface sequence
KLPFQRLVREIAQD

SEQ ID NO: 1898 - protein, 9 aa, Artificial
  helical interface sequence
TEEILAMIK

SEQ ID NO: 1899 - protein, 27 aa, Artificial
  helical interface sequence
PFHGLSIAFLYGSALLFAMHGATILAV

SEQ ID NO: 1900 - protein, 34 aa, Artificial
  helical interface sequence
KSELEALAVSAIREHRRLLWADQAVYEEWLRASD

SEQ ID NO: 1901 - protein, 24 aa, Artificial
  helical interface sequence
YFIIKDVFALAVVLLVFFAIVGFM

SEQ ID NO: 1902 - protein, 27 aa, Artificial
  helical interface sequence
FISDYSIAMDKIHQQDFVNWLLAQKGK

SEQ ID NO: 1903 - protein, 7 aa, Artificial
  helical interface sequence
PWTQRFF

SEQ ID NO: 1904 - protein, 17 aa, Artificial
  helical interface sequence
VPILAVVFILSFIAAIT

SEQ ID NO: 1905 - protein, 19 aa, Artificial
  helical interface sequence
LGEFLKLDRERAKNKIAKE

SEQ ID NO: 1906 - protein, 8 aa, Artificial
  helical interface sequence
DLVQQRMF

SEQ ID NO: 1907 - protein, 5 aa, Artificial
  helical interface sequence
LEDVS

SEQ ID NO: 1908 - protein, 14 aa, Artificial
  helical interface sequence
YSDIAIGIEQAILG

SEQ ID NO: 1909 - protein, 20 aa, Artificial
  helical interface sequence
KVTAMKCFLLELQVISLESG

SEQ ID NO: 1910 - protein, 20 aa, Artificial
  helical interface sequence
KVTAMKCFLLELQVISLESG

SEQ ID NO: 1911 - protein, 8 aa, Artificial
  helical interface sequence
LADLVGFH

SEQ ID NO: 1912 - protein, 26 aa, Artificial
  helical interface sequence
SQEEQCLSNCVNRFLDTNIRIVNGLQ

SEQ ID NO: 1913 - protein, 20 aa, Artificial
  helical interface sequence
KQKVQMSIHQFTNICFKKCV

SEQ ID NO: 1914 - protein, 17 aa, Artificial
  helical interface sequence
TQVLQYIYSHIYVKYVS

SEQ ID NO: 1915 - protein, 28 aa, Artificial
  helical interface sequence
SMEAERVRVFHKQAFEYISIALRIDEDE

SEQ ID NO: 1916 - protein, 113 aa, Artificial
  helical interface sequence
GCRMKGLIDEVNQDFTNRINKLKNSLFEYQKNNKDSHSLTTNIMEILRGDFSSANNRDNTYNRVSEDLRSRIEVLKRKVIEKVQHIQLLQKNVRAQLVDMKRLEVDIDIKIRS

SEQ ID NO: 1917 - protein, 11 aa, Artificial
  helical interface sequence
SMEELSQALAS

SEQ ID NO: 1918 - protein, 40 aa, Artificial; identical to SEQ ID NO: 1389
  helical interface sequence

SEQ ID NO: 1919 - protein, 23 aa, Artificial
  helical interface sequence
YQGWQTQWNQALEDLVRAYQSMS

SEQ ID NO: 1920 - protein, 28 aa, Artificial
  helical interface sequence
LSRLFDNAMLRAHRLHQLAFDTYQEFEE

SEQ ID NO: 1921 - protein, 12 aa, Artificial
  helical interface sequence
GEYRRRWKREVL

SEQ ID NO: 1922 - protein, 16 aa, Artificial
  helical interface sequence
EAETKSTLMFGQRAKT

SEQ ID NO: 1923 - protein, 14 aa, Artificial
  helical interface sequence
TDVAQDMLNIQKAK

SEQ ID NO: 1924 - protein, 22 aa, Artificial
  helical interface sequence
MDVVKDVATEVTLYGLEQYERY

SEQ ID NO: 1925 - protein, 14 aa, Artificial
  helical interface sequence
AGLAMATCDIIFLN

SEQ ID NO: 1926 - protein, 25 aa, Artificial
  helical interface sequence
NRRMAACLRDGEIILRYISYALLAG

SEQ ID NO: 1927 - protein, 29 aa, Artificial
  helical interface sequence
PETNLIATAHYLEALRLQVKAARAMAVFG

SEQ ID NO: 1928 - protein, 15 aa, Artificial
  helical interface sequence
ILFDKEFCEWMIQQI

SEQ ID NO: 1929 - protein, 13 aa, Artificial
  helical interface sequence
VPNWHRDLVRVCE

SEQ ID NO: 1930 - protein, 19 aa, Artificial
  helical interface sequence
VRPKFMAKAALFHIKETKH

SEQ ID NO: 1931 - protein, 11 aa, Artificial
  helical interface sequence
DEEEDDFVYFN

SEQ ID NO: 1932 - protein, 14 aa, Artificial
  helical interface sequence
EAQLNAVDALIDSM

SEQ ID NO: 1933 - protein, 29 aa, Artificial
  helical interface sequence
PAHMIAISFFFTNALALALHGALVLSAAN

SEQ ID NO: 1934 - protein, 33 aa, Artificial; identical to SEQ ID NO: 602
  helical interface sequence

SEQ ID NO: 1935 - protein, 29 aa, Artificial
  helical interface sequence
KSQFLYVLIPAGIYWYWWKNGNEYNEFLY

SEQ ID NO: 1936 - protein, 42 aa, Artificial
  helical interface sequence
TQQAKQTLADIEARHADIMKLETSIRELHDMFMDMAMLVESQ

SEQ ID NO: 1937 - protein, 24 aa, Artificial
  helical interface sequence
VLRTITNLQKKIRKELKQRQLKQE

SEQ ID NO: 1938 - protein, 29 aa, Artificial
  helical interface sequence
PQVAARKILDALEYRTWKLGVHKEVAERY

SEQ ID NO: 1939 - protein, 40 aa, Artificial; identical to SEQ ID NO: 1536
  helical interface sequence

SEQ ID NO: 1940 - protein, 30 aa, Artificial; identical to SEQ ID NO: 1413
  helical interface sequence

SEQ ID NO: 1941 - protein, 30 aa, Artificial; identical to SEQ ID NO: 1413
  helical interface sequence

SEQ ID NO: 1942 - protein, 14 aa, Artificial
  helical interface sequence
HVNQEVIKRMLNLE

SEQ ID NO: 1943 - protein, 21 aa, Artificial
  helical interface sequence
HTIAAFLGGAAAQEVIKIITK

SEQ ID NO: 1944 - protein, 37 aa, Artificial
  helical interface sequence
KDEYLAVAKVTALGISLLGIIGYIIHVPATYIKGILK

SEQ ID NO: 1945 - protein, 63 aa, Artificial; identical to SEQ ID NO: 606
  helical interface sequence

SEQ ID NO: 1946 - protein, 32 aa, Artificial
  helical interface sequence
PGWVSTMQLHFGAIALEEYAASTAEARMARFA

SEQ ID NO: 1947 - protein, 15 aa, Artificial
  helical interface sequence
FDFTHREFRKLWSEG

SEQ ID NO: 1948 - protein, 22 aa, Artificial
  helical interface sequence
WANFYKALQLACEDLAKQIARD

SEQ ID NO: 1949 - protein, 14 aa, Artificial
  helical interface sequence
ERQWKAEFHRWSSY

SEQ ID NO: 1950 - protein, 19 aa, Artificial
  helical interface sequence
TALGVIRSLWKDSLAKTDK

SEQ ID NO: 1951 - protein, 9 aa, Artificial
  helical interface sequence
ALLRYLLDK

SEQ ID NO: 1952 - protein, 34 aa, Artificial
  helical interface sequence
HAEAVQVSRTIDWMALFVVFFVIVGSYHIHAMLT

SEQ ID NO: 1953 - protein, 24 aa, Artificial
  helical interface sequence
YFIIKDVFALAVVLLVFFAIVGFM

SEQ ID NO: 1954 - protein, 18 aa, Artificial
  helical interface sequence
ELEKAMVALIDVFHQYSG

SEQ ID NO: 1955 - protein, 9 aa, Artificial
  helical interface sequence
VDVKYFAQE

SEQ ID NO: 1956 - protein, 9 aa, Artificial
  helical interface sequence
AWLPFARAA

SEQ ID NO: 1957 - protein, 15 aa, Artificial
  helical interface sequence
SSVSLGGIVKYSEQF

SEQ ID NO: 1958 - protein, 11 aa, Artificial
  helical interface sequence
QDQVDDLLDSL

SEQ ID NO: 1959 - protein, 25 aa, Artificial
  helical interface sequence
PEELAFAREFMANTESYLKNVALKH

SEQ ID NO: 1960 - protein, 35 aa, Artificial; identical to SEQ ID NO: 1208
  helical interface sequence

SEQ ID NO: 1961 - protein, 25 aa, Artificial
  helical interface sequence
SDRMAACLRDMEIILRYVTYAVFAG

SEQ ID NO: 1962 - protein, 15 aa, Artificial
  helical interface sequence
MRKIEKTIQYLIGSG

SEQ ID NO: 1963 - protein, 21 aa, Artificial
  helical interface sequence
QEEIIHNIARHLAQIGDEMDH

SEQ ID NO: 1964 - protein, 61 aa, Artificial; identical to SEQ ID NO: 337
  helical interface sequence

SEQ ID NO: 1965 - protein, 62 aa, Artificial; identical to SEQ ID NO: 1240
  helical interface sequence

SEQ ID NO: 1966 - protein, 28 aa, Artificial
  helical interface sequence
FNKVNDHLYSMGYNIGCRLIEDFLARTA

SEQ ID NO: 1967 - protein, 32 aa, Artificial
  helical interface sequence
KKEAYDTLIKDLKKANLCTLAEKIQTIILKDI

SEQ ID NO: 1968 - protein, 20 aa, Artificial
  helical interface sequence
PLQLTSQIEHSIRAHISLYY

SEQ ID NO: 1969 - protein, 28 aa, Artificial
  helical interface sequence
PEGYVVVVKNVGLTLRKLIGSVDDLLPS

SEQ ID NO: 1970 - protein, 6 aa, Artificial
  helical interface sequence
IRARLK

SEQ ID NO: 1971 - protein, 17 aa, Artificial
  helical interface sequence
PAVTLAHELIHAEHRLY

SEQ ID NO: 1972 - protein, 8 aa, Artificial
  helical interface sequence
KRWYRLAS

SEQ ID NO: 1973 - protein, 6 aa, Artificial
  helical interface sequence
NTIFDQ

SEQ ID NO: 1974 - protein, 23 aa, Artificial
  helical interface sequence
SVWAWMFLFGHLVWATGFMFLIS

SEQ ID NO: 1975 - protein, 28 aa, Artificial
  helical interface sequence
EEELLRQQQELFAKARQQQAELAQQEWL

SEQ ID NO: 1976 - protein, 25 aa, Artificial
  helical interface sequence
APYVKDKAEEWRYTDRFLQGYSADG

SEQ ID NO: 1977 - protein, 8 aa, Artificial
  helical interface sequence
DNRYIRAV

SEQ ID NO: 1978 - protein, 21 aa, Artificial
  helical interface sequence
IEAQSRLENLDEFLSVTKHFE

SEQ ID NO: 1979 - protein, 50 aa, Artificial; identical to SEQ ID NO: 605
  helical interface sequence

SEQ ID NO: 1980 - protein, 18 aa, Artificial
  helical interface sequence
GPDYRVLVDKSRKVAHTS

SEQ ID NO: 1981 - protein, 23 aa, Artificial
  helical interface sequence
PKETLSERLSALQDKIIDHYEND

SEQ ID NO: 1982 - protein, 19 aa, Artificial
  helical interface sequence
TLDEAERQWKAEFHRWSSY

SEQ ID NO: 1983 - protein, 20 aa, Artificial
  helical interface sequence
FEEFIMLMARLTWASHEKMH

SEQ ID NO: 1984 - protein, 20 aa, Artificial
  helical interface sequence
PEFQGHVVRVMGGLDILINA

SEQ ID NO: 1985 - protein, 16 aa, Artificial
  helical interface sequence
KLPFQRLVREIAQDFK

SEQ ID NO: 1986 - protein, 29 aa, Artificial
  helical interface sequence
SKAMSIMNSFVNDVFERIAGEASRLAHYN

SEQ ID NO: 1987 - protein, 29 aa, Artificial
  helical interface sequence
SKAMSIMNSFVNDVFERIAGEASRLAHYN

SEQ ID NO: 1988 - protein, 9 aa, Artificial
  helical interface sequence
ALLRYLLDK

SEQ ID NO: 1989 - protein, 10 aa, Artificial
  helical interface sequence
PRIICSWAKA

SEQ ID NO: 1990 - protein, 14 aa, Artificial
  helical interface sequence
AEDHRVWKDYVHTL

SEQ ID NO: 1991 - protein, 22 aa, Artificial
  helical interface sequence
FNEFDNLRRGGIQFADTRGYAY

SEQ ID NO: 1992 - protein, 13 aa, Artificial
  helical interface sequence
LPFQRLVREIAQD

SEQ ID NO: 1993 - protein, 30 aa, Artificial
  helical interface sequence
FKSQFLYVLIPAGIYWYWWKNGNEYNEFLY

SEQ ID NO: 1994 - protein, 22 aa, Artificial
  helical interface sequence
QEERDKVNVDLAASGVAYKERL

SEQ ID NO: 1995 - protein, 11 aa, Artificial
  helical interface sequence
YHFLSEARYKG

SEQ ID NO: 1996 - protein, 19 aa, Artificial
  helical interface sequence
ELAKHAVSEGTKAVTKYTS

SEQ ID NO: 1997 - protein, 9 aa, Artificial
  helical interface sequence
DKDRNSVSL

SEQ ID NO: 1998 - protein, 8 aa, Artificial
  helical interface sequence
HKLVQLLT

SEQ ID NO: 1999 - protein, 19 aa, Artificial
  helical interface sequence
KLLILQQAVQVILGLEQQV

SEQ ID NO: 2000 - protein, 30 aa, Artificial
  helical interface sequence
NEERKRRKYFHMLYLVCLMVHGFIRNEWIN

SEQ ID NO: 2001 - protein, 25 aa, Artificial
  helical interface sequence
QRGKDKCARDIGYYLRMVTYCLIAG

SEQ ID NO: 2002 - protein, 17 aa, Artificial
  helical interface sequence
VADLALSENWAQEFLAA

SEQ ID NO: 2003 - protein, 22 aa, Artificial
  helical interface sequence
PKDALLKAIETVRVMASHYIDE

SEQ ID NO: 2004 - protein, 20 aa, Artificial
  helical interface sequence
KVTAMKCFLLELQVISLESG

SEQ ID NO: 2005 - protein, 26 aa, Artificial
  helical interface sequence
AQQFHRHKQLIRFLKRLDRNLWGLAG

SEQ ID NO: 2006 - protein, 22 aa, Artificial
  helical interface sequence
YLEQKMFAAMVADNQMAMVMLN

SEQ ID NO: 2007 - protein, 23 aa, Artificial
  helical interface sequence
EMEFTEAESNMNDLVSEYQQYQD

SEQ ID NO: 2008 - protein, 50 aa, Artificial
  helical interface sequence
IENLNKKMEDGFLDVWTYNAELLVLMENERTLDFHDSNVKNLYDKVRLQL

SEQ ID NO: 2009 - protein, 49 aa, Artificial
  helical interface sequence
ENLNKKMEDGFLDVWTYNAELLVLMENERTLDFHDSNVKNLYDKVRLQL

SEQ ID NO: 2010 - protein, 6 aa, Artificial
  helical interface sequence
FEKWQA

SEQ ID NO: 2011 - protein, 32 aa, Artificial; identical to SEQ ID NO: 990
  helical interface sequence

SEQ ID NO: 2012 - protein, 25 aa, Artificial
  helical interface sequence
QEMTATCLRDLDYYLRLITYGIVAG

SEQ ID NO: 2013 - protein, 6 aa, Artificial
  helical interface sequence
FKDYGH

SEQ ID NO: 2014 - protein, 25 aa, Artificial
  helical interface sequence
SLQENEFRLYYYNKFKDVASTLNKA

SEQ ID NO: 2015 - protein, 9 aa, Artificial
  helical interface sequence
LEELRKQRG

SEQ ID NO: 2016 - protein, 31 aa, Artificial; identical to SEQ ID NO: 930
  helical interface sequence

SEQ ID NO: 2017 - protein, 25 aa, Artificial
  helical interface sequence
QRGKDKCARDIGYYLRMVTYCLIAG

SEQ ID NO: 2018 - protein, 10 aa, Artificial
  helical interface sequence
PRDAQHFTQR

SEQ ID NO: 2019 - protein, 27 aa, Artificial
  helical interface sequence
PEGLRCFYYLVQDLKCLVFSLIGLHFK

SEQ ID NO: 2020 - protein, 21 aa, Artificial
  helical interface sequence
DVKQLTEAVQKITTESIVIWG

SEQ ID NO: 2021 - protein, 11 aa, Artificial
  helical interface sequence
EMERDCMIAHG

SEQ ID NO: 2022 - protein, 22 aa, Artificial
  helical interface sequence
ADAELQRLKNERHEEAELERLK

SEQ ID NO: 2023 - protein, 12 aa, Artificial
  helical interface sequence
EKALMKAVATVG

SEQ ID NO: 2024 - protein, 12 aa, Artificial
  helical interface sequence
VFTWSLPFVGEK

SEQ ID NO: 2025 - protein, 29 aa, Artificial
  helical interface sequence
PQVAARKILDALEYRTWKLGVHKEVAERY

SEQ ID NO: 2026 - protein, 26 aa, Artificial
  helical interface sequence
PTWRTSSCNRYWGAFLFNEYGLFNAH

SEQ ID NO: 2027 - protein, 20 aa, Artificial
  helical interface sequence
VNYFLDGERQLGTRLMELRN

SEQ ID NO: 2028 - protein, 43 aa, Artificial; identical to SEQ ID NO: 26
  helical interface sequence

SEQ ID NO: 2029 - protein, 16 aa, Artificial
  helical interface sequence
DLIYSILTQIASDVYG

SEQ ID NO: 2030 - protein, 23 aa, Artificial
  helical interface sequence
TILPAIILILIALPSLRILYMMD

SEQ ID NO: 2031 - protein, 32 aa, Artificial; identical to SEQ ID NO: 1282
  helical interface sequence

SEQ ID NO: 2032 - protein, 32 aa, Artificial; identical to SEQ ID NO: 1282
  helical interface sequence

SEQ ID NO: 2033 - protein, 14 aa, Artificial
  helical interface sequence
ITDIVSSLQLQFES

SEQ ID NO: 2034 - protein, 23 aa, Artificial
  helical interface sequence
AGIAIELVRLFAVELEHYEKIEG

SEQ ID NO: 2035 - protein, 42 aa, Artificial
  helical interface sequence
YFSKGIPNVLRRTRACILRVAPPFVAFYLVYTWGTQEFEKSK

SEQ ID NO: 2036 - protein, 18 aa, Artificial
  helical interface sequence
ELAKHAVSEGTKAVTKYT

SEQ ID NO: 2037 - protein, 9 aa, Artificial
  helical interface sequence
VEHIKRYTS

SEQ ID NO: 2038 - protein, 19 aa, Artificial
  helical interface sequence
PDEVVSLVNQGLQEGERDF

SEQ ID NO: 2039 - protein, 29 aa, Artificial
  helical interface sequence
RFAKLLLRLPALRSIGLKCLEHLFFFKLI

SEQ ID NO: 2040 - protein, 21 aa, Artificial
  helical interface sequence
EEDMVTVVEDWMNFYINYYRQ

SEQ ID NO: 2041 - protein, 29 aa, Artificial
  helical interface sequence
SKAMSIMNSFVNDVFERIAGEASRLAHYN

SEQ ID NO: 2042 - protein, 18 aa, Artificial
  helical interface sequence
APAILFDKEFCEWMIQQI

SEQ ID NO: 2043 - protein, 18 aa, Artificial
  helical interface sequence
RREIELSKVIREALESAV

SEQ ID NO: 2044 - protein, 7 aa, Artificial
  helical interface sequence
PLHTLMH

SEQ ID NO: 2045 - protein, 26 aa, Artificial
  helical interface sequence
PNDLLYVFPVVIMGTFACIVALSVLD

SEQ ID NO: 2046 - protein, 37 aa, Artificial; identical to SEQ ID NO: 935
  helical interface sequence

SEQ ID NO: 2047 - protein, 24 aa, Artificial
  helical interface sequence
NADISQSLLQTFIGRFRRIMDSSQ

SEQ ID NO: 2048 - protein, 18 aa, Artificial
  helical interface sequence
EAAYFFTNILSAESFISN

SEQ ID NO: 2049 - protein, 16 aa, Artificial
  helical interface sequence
VLKVFLENVIRDAVTY

SEQ ID NO: 2050 - protein, 8 aa, Artificial
  helical interface sequence
ERELLESY

SEQ ID NO: 2051 - protein, 25 aa, Artificial
  helical interface sequence
DIALKKKLEQNTKKLDEESSQLETT

SEQ ID NO: 2052 - protein, 25 aa, Artificial
  helical interface sequence
PEELAFAREFMANTESYLKNVALKH

SEQ ID NO: 2053 - protein, 53 aa, Artificial
  helical interface sequence
NEILELDEKVDDLRADTISSQIELAVLLSNEGIINSEDEHLLALERKLKKMLG

SEQ ID NO: 2054 - protein, 10 aa, Artificial
  helical interface sequence
DTIFQACLDH

SEQ ID NO: 2055 - protein, 25 aa, Artificial
  helical interface sequence
DTNQAKCARDISHYLRFITYSLVAG

SEQ ID NO: 2056 - protein, 25 aa, Artificial
  helical interface sequence
NRRMAACLRDMEIILRYVSYALLAG

SEQ ID NO: 2057 - protein, 22 aa, Artificial
  helical interface sequence
AADCQFWETWLGSQCRLHELRE

SEQ ID NO: 2058 - protein, 14 aa, Artificial
  helical interface sequence
SVDLHTHCSYQLML

SEQ ID NO: 2059 - protein, 9 aa, Artificial
  helical interface sequence
KINLLGFLG

SEQ ID NO: 2060 - protein, 60 aa, Artificial
  helical interface sequence
TLQRCLEENQELRDAIRQSNQILRERCEELLHFQASQREEKEFLMCKFQEARKLVERLGL

SEQ ID NO: 2061 - protein, 30 aa, Artificial
  helical interface sequence
QHIQLLQKNVRAQLVDMKRLEVDIDIKIRS

SEQ ID NO: 2062 - protein, 8 aa, Artificial
  helical interface sequence
WLEAWRRD

SEQ ID NO: 2063 - protein, 29 aa, Artificial
  helical interface sequence
VKQLEDVVEELLSVNYHLENVVARLKKLV

SEQ ID NO: 2064 - protein, 31 aa, Artificial
  helical interface sequence
PGWISTLKSHYGAIAVGEYAAVTGEGRMARF

SEQ ID NO: 2065 - protein, 15 aa, Artificial
  helical interface sequence
PEVKRRIMLGTFALS

SEQ ID NO: 2066 - protein, 96 aa, Artificial; identical to SEQ ID NO: 202
  helical interface sequence

SEQ ID NO: 2067 - protein, 24 aa, Artificial
  helical interface sequence
PERILLEAGKSIIRKIEELEKKLV

SEQ ID NO: 2068 - protein, 29 aa, Artificial
  helical interface sequence
MRRKNDTHQQDIDDLKRQNALLEQQVRAL

SEQ ID NO: 2069 - protein, 12 aa, Artificial
  helical interface sequence
IVTKSIVNADAE

SEQ ID NO: 2070 - protein, 14 aa, Artificial
  helical interface sequence
DYHDYVGTFEFWWN

SEQ ID NO: 2071 - protein, 36 aa, Artificial; identical to SEQ ID NO: 312
  helical interface sequence

SEQ ID NO: 2072 - protein, 31 aa, Artificial
  helical interface sequence
EHEKHIFISNLKYQTLLDSIQGRSPNVALLP

SEQ ID NO: 2073 - protein, 31 aa, Artificial
  helical interface sequence
ALLKNYGLLYCFRKDMDKVETFLRIVQCRSV

SEQ ID NO: 2074 - protein, 21 aa, Artificial
  helical interface sequence
TDVIIAFQAQCRGYLARKAFA

SEQ ID NO: 2075 - protein, 21 aa, Artificial
  helical interface sequence
TDVIIAFQAQCRGYLARKAFA

SEQ ID NO: 2076 - protein, 19 aa, Artificial
  helical interface sequence
ARPKYQAKSAILHIKETKY

SEQ ID NO: 2077 - protein, 6 aa, Artificial
  helical interface sequence
QIDYAL

SEQ ID NO: 2078 - protein, 32 aa, Artificial; identical to SEQ ID NO: 825
  helical interface sequence

SEQ ID NO: 2079 - protein, 48 aa, Artificial
  helical interface sequence
EGEVNKIKSALLSTNKAVVSLSNGVSVLTSKVLDLKNYIDKQLLPIVN

SEQ ID NO: 2080 - protein, 25 aa, Artificial
  helical interface sequence
QRGKDKCARDIGYYLRMVTYCLIAG

SEQ ID NO: 2081 - protein, 6 aa, Artificial
  helical interface sequence
AIREMV

SEQ ID NO: 2082 - protein, 21 aa, Artificial
  helical interface sequence
DVKQLTEAVQKITTESIVIWG

SEQ ID NO: 2083 - protein, 6 aa, Artificial
  helical interface sequence
NFLVPR

SEQ ID NO: 2084 - protein, 20 aa, Artificial
  helical interface sequence
EIIIRNEKRMLQEAVDALLD

SEQ ID NO: 2085 - protein, 14 aa, Artificial
  helical interface sequence
EGVATYAAAVLFRM

SEQ ID NO: 2086 - protein, 10 aa, Artificial
  helical interface sequence
QWGERMWLAE

SEQ ID NO: 2087 - protein, 10 aa, Artificial
  helical interface sequence
QWGERMWLAE

SEQ ID NO: 2088 - protein, 13 aa, Artificial
  helical interface sequence
EKELNRIKRWCIM

SEQ ID NO: 2089 - protein, 9 aa, Artificial
  helical interface sequence
EIKNMWAAF

SEQ ID NO: 2090 - protein, 12 aa, Artificial
  helical interface sequence
FTVFLTMFGEKL

SEQ ID NO: 2091 - protein, 21 aa, Artificial
  helical interface sequence
PDFRANLDAFAAGINAYAQQN

SEQ ID NO: 2092 - protein, 13 aa, Artificial
  helical interface sequence
TPDAHFFTEVRYK

SEQ ID NO: 2093 - protein, 7 aa, Artificial
  helical interface sequence
IIANMLQ

SEQ ID NO: 2094 - protein, 28 aa, Artificial
  helical interface sequence
PEFLEQKRAEVDTVCRHNYEIFDNFLVP

SEQ ID NO: 2095 - protein, 59 aa, Artificial; identical to SEQ ID NO: 1705
  helical interface sequence

SEQ ID NO: 2096 - protein, 12 aa, Artificial
  helical interface sequence
NCFMGCMDEHEL

SEQ ID NO: 2097 - protein, 14 aa, Artificial
  helical interface sequence
VPPAAGAAISMKLL

SEQ ID NO: 2098 - protein, 22 aa, Artificial
  helical interface sequence
PQGALRNMAVAKHNLNIMIKRY

SEQ ID NO: 2099 - protein, 14 aa, Artificial
  helical interface sequence
EKELEDRTQAFMEK

SEQ ID NO: 2100 - protein, 20 aa, Artificial
  helical interface sequence
FEEFIMLMARLTWASHEKMH

SEQ ID NO: 2101 - protein, 11 aa, Artificial
  helical interface sequence
YYSHPRLFWLS

SEQ ID NO: 2102 - protein, 28 aa, Artificial
  helical interface sequence
PGFAQLFFDAASEEREHAMKLIEYLLMR

SEQ ID NO: 2103 - protein, 28 aa, Artificial
  helical interface sequence
PGFAQLFFDAASEEREHAMKLIEYLLMR

SEQ ID NO: 2104 - protein, 28 aa, Artificial
  helical interface sequence
PGFAQLFFDAASEEREHAMKLIEYLLMR

SEQ ID NO: 2105 - protein, 28 aa, Artificial
  helical interface sequence
PGFAQLFFDAASEEREHAMKLIEYLLMR

SEQ ID NO: 2106 - protein, 28 aa, Artificial
  helical interface sequence
PGFAQLFFDAASEEREHAMKLIEYLLMR

SEQ ID NO: 2107 - protein, 28 aa, Artificial
  helical interface sequence
PGFAQLFFDAASEEREHAMKLIEYLLMR

SEQ ID NO: 2108 - protein, 14 aa, Artificial
  helical interface sequence
LEEYNSLEETAYLL

SEQ ID NO: 2109 - protein, 29 aa, Artificial
  helical interface sequence
PLMFPRMLMKLVSLRTLSSVHSEQVFALR

SEQ ID NO: 2110 - protein, 10 aa, Artificial
  helical interface sequence
PEVKEQVQSM

SEQ ID NO: 2111 - protein, 62 aa, Artificial; identical to SEQ ID NO: 141
  helical interface sequence

SEQ ID NO: 2112 - protein, 7 aa, Artificial
  helical interface sequence
RRIEVFY

SEQ ID NO: 2113 - protein, 15 aa, Artificial
  helical interface sequence
PATKSMIQREAIRTF

SEQ ID NO: 2114 - protein, 14 aa, Artificial
  helical interface sequence
RNFRLLEELEKGEK

SEQ ID NO: 2115 - protein, 22 aa, Artificial
  helical interface sequence
PEYNISLGERRANAVKMYLQGK

SEQ ID NO: 2116 - protein, 8 aa, Artificial
  helical interface sequence
WLPFARAA

SEQ ID NO: 2117 - protein, 17 aa, Artificial
  helical interface sequence
FRTRKEAAWAITNATSG

SEQ ID NO: 2118 - protein, 13 aa, Artificial
  helical interface sequence
VATHRKAQRAVNL

SEQ ID NO: 2119 - protein, 14 aa, Artificial
  helical interface sequence
AGLAMGTMDIVKLH

SEQ ID NO: 2120 - protein, 11 aa, Artificial
  helical interface sequence
TREGNDLYHEM

SEQ ID NO: 2121 - protein, 25 aa, Artificial
  helical interface sequence
DLKDAEAVQKFFLEEIQLGEELLAQ

SEQ ID NO: 2122 - protein, 23 aa, Artificial
  helical interface sequence
TWPHIVAALVWLIDCIKIHTAMK

SEQ ID NO: 2123 - protein, 18 aa, Artificial
  helical interface sequence
LGTIKSRIRLALDRLRQH

SEQ ID NO: 2124 - protein, 20 aa, Artificial
  helical interface sequence
KQKVQMSIHQFTNICFKKCV

SEQ ID NO: 2125 - protein, 22 aa, Artificial
  helical interface sequence
VLSKFFFFIFVFNFVLLGQIGA

SEQ ID NO: 2126 - protein, 18 aa, Artificial
  helical interface sequence
TMENLSRRLKVTGDLFDI

SEQ ID NO: 2127 - protein, 8 aa, Artificial
  helical interface sequence
EDEIRAEF

SEQ ID NO: 2128 - protein, 16 aa, Artificial
  helical interface sequence
LIETLEKAREKAVEVM

SEQ ID NO: 2129 - protein, 28 aa, Artificial
  helical interface sequence
KRNRAITARRQHLKSVMLQIAATELEKE

SEQ ID NO: 2130 - protein, 16 aa, Artificial
  helical interface sequence
RVDNYCRHNYGVVESF

SEQ ID NO: 2131 - protein, 25 aa, Artificial
  helical interface sequence
TRRYAACIRDLDYYLRYATYAMLAG

SEQ ID NO: 2132 - protein, 39 aa, Artificial; identical to SEQ ID NO: 244
  helical interface sequence

SEQ ID NO: 2133 - protein, 25 aa, Artificial
  helical interface sequence
TRRYAACIRDLDYYLRYATYAMLAG

SEQ ID NO: 2134 - protein, 36 aa, Artificial; identical to SEQ ID NO: 312
  helical interface sequence

SEQ ID NO: 2135 - protein, 8 aa, Artificial
  helical interface sequence
DEDYYELI

SEQ ID NO: 2136 - protein, 25 aa, Artificial
  helical interface sequence
HAPYVKDKAEEWRYTDRFLQGYSAD

SEQ ID NO: 2137 - protein, 25 aa, Artificial
  helical interface sequence
SRRMAACLRDMEIILRYVTYAVFAG

SEQ ID NO: 2138 - protein, 21 aa, Artificial
  helical interface sequence
PDFRANLDAFAAGINAYAQQN

SEQ ID NO: 2139 - protein, 20 aa, Artificial
  helical interface sequence
WRDRFLFVAEAIYKAQAETG

SEQ ID NO: 2140 - protein, 18 aa, Artificial
  helical interface sequence
KYRLTVVVAKRAQQLLRH

SEQ ID NO: 2141 - protein, 6 aa, Artificial
  helical interface sequence
WNKILS

SEQ ID NO: 2142 - protein, 21 aa, Artificial
  helical interface sequence
AADGDALVKRFKNSVKWYHFD

SEQ ID NO: 2143 - protein, 7 aa, Artificial
  helical interface sequence
AADCQFW

SEQ ID NO: 2144 - protein, 25 aa, Artificial
  helical interface sequence
QEKINKCYRDIDHYMRLINYTLVVG

SEQ ID NO: 2145 - protein, 7 aa, Artificial
  helical interface sequence
TSLYIFK

SEQ ID NO: 2146 - protein, 14 aa, Artificial
  helical interface sequence
AGAINELCWGLEEQ

SEQ ID NO: 2147 - protein, 21 aa, Artificial
  helical interface sequence
ASTNAVIAAVCATEVFKIATS

SEQ ID NO: 2148 - protein, 12 aa, Artificial
  helical interface sequence
IVAAHGYFGRLI

SEQ ID NO: 2149 - protein, 8 aa, Artificial
  helical interface sequence
VHWYVGEG

SEQ ID NO: 2150 - protein, 35 aa, Artificial
  helical interface sequence
SEARKGFSYLVTATTTVGVAYAAKNVVSQFVSSMS

SEQ ID NO: 2151 - protein, 14 aa, Artificial
  helical interface sequence
YTVWHFRRVLLKSL

SEQ ID NO: 2152 - protein, 32 aa, Artificial; identical to SEQ ID NO: 1282
  helical interface sequence

SEQ ID NO: 2153 - protein, 13 aa, Artificial
  helical interface sequence
LKERCLQVVRSLV

SEQ ID NO: 2154 - protein, 28 aa, Artificial
  helical interface sequence
PGFAQLFFDAASEEREHAMKLIEYLLMR

SEQ ID NO: 2155 - protein, 28 aa, Artificial
  helical interface sequence
PGFAQLFFDAASEEREHAMKLIEYLLMR

SEQ ID NO: 2156 - protein, 41 aa, Artificial
  helical interface sequence
KEELYAMLVGRVKAPITGLVFALSGILRNLVYVLNAIKEKK

SEQ ID NO: 2157 - protein, 20 aa, Artificial
  helical interface sequence
IVEFLNRWITFCQSIISTLT

SEQ ID NO: 2158 - protein, 10 aa, Artificial
  helical interface sequence
PNYRRRLVRW

SEQ ID NO: 2159 - protein, 32 aa, Artificial; identical to SEQ ID NO: 1262
  helical interface sequence

SEQ ID NO: 2160 - protein, 14 aa, Artificial
  helical interface sequence
LHDLVDYYYFWKED

SEQ ID NO: 2161 - protein, 13 aa, Artificial
  helical interface sequence
GEYRRRWKREVLG

SEQ ID NO: 2162 - protein, 22 aa, Artificial
  helical interface sequence
FNEFDNLRRGGIQFADTRGYAY

SEQ ID NO: 2163 - protein, 22 aa, Artificial
  helical interface sequence
FNEFDNLRRGGIQFADTRGYAY

SEQ ID NO: 2164 - protein, 11 aa, Artificial
  helical interface sequence
FGELKQRVERL

SEQ ID NO: 2165 - protein, 16 aa, Artificial
  helical interface sequence
RFETKALADAKAALEA

SEQ ID NO: 2166 - protein, 22 aa, Artificial
  helical interface sequence
VLSKFFFFIFVFNFVLLGQIGA

SEQ ID NO: 2167 - protein, 29 aa, Artificial
  helical interface sequence
SSAVMALQEASEAYLVGLFEDTNLCAIHA

SEQ ID NO: 2168 - protein, 32 aa, Artificial
  helical interface sequence
PGTIFAKLLSVLTELRTLGNQNSEMCFSLKLK

SEQ ID NO: 2169 - protein, 24 aa, Artificial
  helical interface sequence
NADISQSLLQTFIGRFRRIMDSSQ

SEQ ID NO: 2170 - protein, 15 aa, Artificial
  helical interface sequence
IITTVLQVISNVIDY

SEQ ID NO: 2171 - protein, 25 aa, Artificial
  helical interface sequence
SDRMAACLRDMEIILRYVTYAVFAG

SEQ ID NO: 2172 - protein, 21 aa, Artificial
  helical interface sequence
LDYKLLQLFKLFENALFSVLY

SEQ ID NO: 2173 - protein, 25 aa, Artificial
  helical interface sequence
DTNQAKCARDISHYLRFITYSLVAG

SEQ ID NO: 2174 - protein, 24 aa, Artificial
  helical interface sequence
RILLEAGKSIIRKIEELEKKLVEV

SEQ ID NO: 2175 - protein, 34 aa, Artificial
  helical interface sequence
DIVQQQNNLLRAIEAQQHLLQLTVWGIKQLQARI

SEQ ID NO: 2176 - protein, 10 aa, Artificial
  helical interface sequence
SAPIAVFVSV

SEQ ID NO: 2177 - protein, 21 aa, Artificial
  helical interface sequence
SLYNMGKHALVGLTQSAALEL

SEQ ID NO: 2178 - protein, 24 aa, Artificial
  helical interface sequence
VRYWVIHSITIPALFIAGWLFVST

SEQ ID NO: 2179 - protein, 13 aa, Artificial
  helical interface sequence
QRALAVRAYAEKV

SEQ ID NO: 2180 - protein, 22 aa, Artificial
  helical interface sequence
VGDAQVLVRYMKAELELYRLQR

SEQ ID NO: 2181 - protein, 6 aa, Artificial
  helical interface sequence
FDILST

SEQ ID NO: 2182 - protein, 24 aa, Artificial
  helical interface sequence
DACIDQCLAKYMRSWNVISKAYIS

SEQ ID NO: 2183 - protein, 19 aa, Artificial
  helical interface sequence
LSAMAFLFQEMISQLHRTC

SEQ ID NO: 2184 - protein, 36 aa, Artificial; identical to SEQ ID NO: 737
  helical interface sequence

SEQ ID NO: 2185 - protein, 9 aa, Artificial
  helical interface sequence
DRLRPLSYP

SEQ ID NO: 2186 - protein, 33 aa, Artificial
  helical interface sequence
KKEAYDTLIKDLKKANLCTLAEKIQTIILKDIT

SEQ ID NO: 2187 - protein, 31 aa, Artificial; identical to SEQ ID NO: 2064
  helical interface sequence

SEQ ID NO: 2188 - protein, 19 aa, Artificial
  helical interface sequence
YLKAQKVRRLITNDFLKAF

SEQ ID NO: 2189 - protein, 19 aa, Artificial
  helical interface sequence
ISSYYDELIEMTSYWHLLG

SEQ ID NO: 2190 - protein, 9 aa, Artificial
  helical interface sequence
ERELLESYI

SEQ ID NO: 2191 - protein, 13 aa, Artificial
  helical interface sequence
QQDMVRVKHRLLR

SEQ ID NO: 2192 - protein, 29 aa, Artificial
  helical interface sequence
SKAMSIMNSFVNDVFERIAGEASRLAHYN

SEQ ID NO: 2193 - protein, 18 aa, Artificial
  helical interface sequence
GPDYRVLVDKSRKVAHTS

SEQ ID NO: 2194 - protein, 21 aa, Artificial
  helical interface sequence
PDFRANLDAFAAGINAYAQQN

SEQ ID NO: 2195 - protein, 20 aa, Artificial
  helical interface sequence
VEAVEIMQRIHVLRSQGGFN

SEQ ID NO: 2196 - protein, 13 aa, Artificial
  helical interface sequence
VPNWHRDLVRVCE

SEQ ID NO: 2197 - protein, 12 aa, Artificial
  helical interface sequence
DERILAIYNALR

SEQ ID NO: 2198 - protein, 9 aa, Artificial
  helical interface sequence
NSELLHMLE

SEQ ID NO: 2199 - protein, 68 aa, Artificial; identical to SEQ ID NO: 1311
  helical interface sequence

SEQ ID NO: 2200 - protein, 18 aa, Artificial
  helical interface sequence
CYSFASMGMLEARIRILT

SEQ ID NO: 2201 - protein, 12 aa, Artificial
  helical interface sequence
IEGLVELLNRVQ

SEQ ID NO: 2202 - protein, 27 aa, Artificial
  helical interface sequence
PEKRKLIQQQLVLLLHAHKCQRREQAN

SEQ ID NO: 2203 - protein, 18 aa, Artificial
  helical interface sequence
KVEILRNAIRYIEGLQAL

SEQ ID NO: 2204 - protein, 20 aa, Artificial
  helical interface sequence
VNYFLDGERQLGTRLMELRN

SEQ ID NO: 2205 - protein, 22 aa, Artificial
  helical interface sequence
KGSPAIFQHTMRQVLEPFRKAN

SEQ ID NO: 2206 - protein, 9 aa, Artificial
  helical interface sequence
KILHRLLQD

SEQ ID NO: 2207 - protein, 15 aa, Artificial
  helical interface sequence
EKELNRIKRWCIMRQ

SEQ ID NO: 2208 - protein, 13 aa, Artificial
  helical interface sequence
NSVWNQRHFVISN

SEQ ID NO: 2209 - protein, 32 aa, Artificial; identical to SEQ ID NO: 1080
  helical interface sequence

SEQ ID NO: 2210 - protein, 19 aa, Artificial
  helical interface sequence
TDTCYVLSYSVIMLNTDLH

SEQ ID NO: 2211 - protein, 17 aa, Artificial
  helical interface sequence
PEDLFETISQALLNAAD

SEQ ID NO: 2212 - protein, 61 aa, Artificial
  helical interface sequence
KAERKRMRNRIAASKSRKRKLERIARLEEKVKTLKAQNSELASTANMLREQVAQLKQKVMN

SEQ ID NO: 2213 - protein, 14 aa, Artificial
  helical interface sequence
AKNYGRAVYECLRG

SEQ ID NO: 2214 - protein, 11 aa, Artificial
  helical interface sequence
PYVRKTAAVCV

SEQ ID NO: 2215 - protein, 18 aa, Artificial
  helical interface sequence
PLLQGRLFSYTDTQISRL

SEQ ID NO: 2216 - protein, 21 aa, Artificial
  helical interface sequence
PDFRANLDAFAAGINAYAQQN

SEQ ID NO: 2217 - protein, 22 aa, Artificial
  helical interface sequence
DDLQQIHTGIMLSTRLLNDVNQ

SEQ ID NO: 2218 - protein, 24 aa, Artificial
  helical interface sequence
ATGKAKCARDIGYYLRMVTYCLVV

SEQ ID NO: 2219 - protein, 21 aa, Artificial
  helical interface sequence
INEEIHTQFLDHLLTGIEDIC

SEQ ID NO: 2220 - protein, 28 aa, Artificial
  helical interface sequence
GWLIRSIHRWSASMMVLMMILHVFRVYL

SEQ ID NO: 2221 - protein, 32 aa, Artificial; identical to SEQ ID NO: 1262
  helical interface sequence

SEQ ID NO: 2222 - protein, 23 aa, Artificial
  helical interface sequence
AAVAVEFARLYAVELEHYEKLEG

SEQ ID NO: 2223 - protein, 17 aa, Artificial
  helical interface sequence
DVVREAQAGMVEFTLLN

SEQ ID NO: 2224 - protein, 37 aa, Artificial
  helical interface sequence
ELMQQVNVLKLTVEDLEKERDFYFGKLRNIELICQEN

SEQ ID NO: 2225 - protein, 12 aa, Artificial
  helical interface sequence
RLEVDIDIKIRS

SEQ ID NO: 2226 - protein, 15 aa, Artificial
  helical interface sequence
KRELQVLYRGFKNEC

SEQ ID NO: 2227 - protein, 9 aa, Artificial
  helical interface sequence
LEEVLAISR

SEQ ID NO: 2228 - protein, 22 aa, Artificial
  helical interface sequence
QEERDKVNVDLAASGVAYKERL

SEQ ID NO: 2229 - protein, 19 aa, Artificial
  helical interface sequence
SELFTLTYGALVTQLCKDY

SEQ ID NO: 2230 - protein, 10 aa, Artificial
  helical interface sequence
PVCLPLKNAS

SEQ ID NO: 2231 - protein, 14 aa, Artificial
  helical interface sequence
AGLAMGTMDIVKLH

SEQ ID NO: 2232 - protein, 24 aa, Artificial
  helical interface sequence
PERILLEAGKSIIRKIEELEKKLV

SEQ ID NO: 2233 - protein, 25 aa, Artificial
  helical interface sequence
SDRMAACLRDMEIILRYVTYAVFAG

SEQ ID NO: 2234 - protein, 25 aa, Artificial
  helical interface sequence
DTNQAKCARDISHYLRFITYSLVAG

SEQ ID NO: 2235 - protein, 16 aa, Artificial
  helical interface sequence
KANREKMTQIMFETFN

SEQ ID NO: 2236 - protein, 9 aa, Artificial
  helical interface sequence
AHMLGFYLT

SEQ ID NO: 2237 - protein, 7 aa, Artificial
  helical interface sequence
FSDLWKL

SEQ ID NO: 2238 - protein, 9 aa, Artificial
  helical interface sequence
PTYKFFEQM

SEQ ID NO: 2239 - protein, 32 aa, Artificial; identical to SEQ ID NO: 1967
  helical interface sequence

SEQ ID NO: 2240 - protein, 16 aa, Artificial
  helical interface sequence
NLVADLVQEVQQARDL

SEQ ID NO: 2241 - protein, 12 aa, Artificial
  helical interface sequence
RLPALRSIGLKC

SEQ ID NO: 2242 - protein, 24 aa, Artificial
  helical interface sequence
PEGYVVVVKNVGLTLRKLIGSVDD

SEQ ID NO: 2243 - protein, 20 aa, Artificial
  helical interface sequence
VRGIDTLQKKVASILLALTQ

SEQ ID NO: 2244 - protein, 18 aa, Artificial
  helical interface sequence
VPQASVCHEGQMNALAKA

SEQ ID NO: 2245 - protein, 13 aa, Artificial
  helical interface sequence
KNATEAAWRALAS

SEQ ID NO: 2246 - protein, 14 aa, Artificial
  helical interface sequence
PRQALVLFQYFLQG

SEQ ID NO: 2247 - protein, 25 aa, Artificial
  helical interface sequence
TESVDILEDLVIEFITEMTHKAMSI

SEQ ID NO: 2248 - protein, 16 aa, Artificial
  helical interface sequence
AEETRRMLHRAFDTLA

SEQ ID NO: 2249 - protein, 19 aa, Artificial
  helical interface sequence
VYNNVVRTCIEAMAATQGH

SEQ ID NO: 2250 - protein, 19 aa, Artificial
  helical interface sequence
AQDVKKIEKFHSQLMRLMV

SEQ ID NO: 2251 - protein, 36 aa, Artificial
  helical interface sequence
ELGRHSAEYYNKQYLERTRAELDTACRHNYEETEVP

SEQ ID NO: 2252 - protein, 12 aa, Artificial
  helical interface sequence
AEKVFKQYANDN

SEQ ID NO: 2253 - protein, 8 aa, Artificial
  helical interface sequence
IKPIQRVL

SEQ ID NO: 2254 - protein, 30 aa, Artificial
  helical interface sequence
DEFDASISQVNEKINQSLAFIRKSDELLHN

SEQ ID NO: 2255 - protein, 20 aa, Artificial
  helical interface sequence
VEAVEIMQRIHVLRSQGGFN

SEQ ID NO: 2256 - protein, 25 aa, Artificial
  helical interface sequence
PEGKAKCARDIGYYLRMITYCLVAG

SEQ ID NO: 2257 - protein, 29 aa, Artificial
  helical interface sequence
QKSMSILNSFVNDIFERIATEASKLAAYN

SEQ ID NO: 2258 - protein, 15 aa, Artificial
  helical interface sequence
AKNYGRAVYECLRGG

SEQ ID NO: 2259 - protein, 11 aa, Artificial
  helical interface sequence
LKERCLQVVRS

SEQ ID NO: 2260 - protein, 46 aa, Artificial; identical to SEQ ID NO: 1500
  helical interface sequence

SEQ ID NO: 2261 - protein, 14 aa, Artificial
  helical interface sequence
EREKLVIQLIFYEE

SEQ ID NO: 2262 - protein, 11 aa, Artificial
  helical interface sequence
WRPIVQFLRYQ

SEQ ID NO: 2263 - protein, 17 aa, Artificial
  helical interface sequence
VFEQDDGENWVEIQQVL

SEQ ID NO: 2264 - protein, 22 aa, Artificial
  helical interface sequence
PQGALRNMAVAKHNLNIMIKRY

SEQ ID NO: 2265 - protein, 22 aa, Artificial
  helical interface sequence
EDVGIHVVDGVLEDIRLGMEVN

SEQ ID NO: 2266 - protein, 16 aa, Artificial
  helical interface sequence
YMGMVWAMMSIGFLGF

SEQ ID NO: 2267 - protein, 28 aa, Artificial
  helical interface sequence
DTWAKIHFAIMFVGVNMTFFPQHFLGLS

SEQ ID NO: 2268 - protein, 11 aa, Artificial
  helical interface sequence
RRVAEIESEMN

SEQ ID NO: 2269 - protein, 19 aa, Artificial
  helical interface sequence
TLDEAERQWKAEFHRWSSY

SEQ ID NO: 2270 - protein, 20 aa, Artificial
  helical interface sequence
FDSIAKMLLIKYKDFILSKF

SEQ ID NO: 2271 - protein, 17 aa, Artificial
  helical interface sequence
PFEQRHIVDGFSFELSK

SEQ ID NO: 2272 - protein, 10 aa, Artificial
  helical interface sequence
IFIPRLLMVD

SEQ ID NO: 2273 - protein, 23 aa, Artificial
  helical interface sequence
KQVESRKGEEERNANRAEHFKKT

SEQ ID NO: 2274 - protein, 11 aa, Artificial
  helical interface sequence
FERAAELRDLL

SEQ ID NO: 2275 - protein, 26 aa, Artificial
  helical interface sequence
FANQAKLRVQEAVFYIWSDKTLKYSQ

SEQ ID NO: 2276 - protein, 12 aa, Artificial
  helical interface sequence
PAELIERLEQAW

SEQ ID NO: 2277 - protein, 22 aa, Artificial
  helical interface sequence
FNEFDNLRRGGIQFADTRGYAY

SEQ ID NO: 2278 - protein, 27 aa, Artificial
  helical interface sequence
PEGLRVFYYLVQDLKCLVFSLIGLHFK

SEQ ID NO: 2279 - protein, 13 aa, Artificial
  helical interface sequence
LQHICRTVICNCT

SEQ ID NO: 2280 - protein, 12 aa, Artificial
  helical interface sequence
SREIQTAVRLLL

SEQ ID NO: 2281 - protein, 14 aa, Artificial
  helical interface sequence
TLDMLTVKVKLDEA

SEQ ID NO: 2282 - protein, 36 aa, Artificial; identical to SEQ ID NO: 1085
  helical interface sequence

SEQ ID NO: 2283 - protein, 15 aa, Artificial
  helical interface sequence
QGTLFELILAANYLD

SEQ ID NO: 2284 - protein, 6 aa, Artificial
  helical interface sequence
FEQMFT

SEQ ID NO: 2285 - protein, 19 aa, Artificial
  helical interface sequence
PQAKIAELENQVHRLEQEL

SEQ ID NO: 2286 - protein, 30 aa, Artificial; identical to SEQ ID NO: 1770
  helical interface sequence

SEQ ID NO: 2287 - protein, 25 aa, Artificial
  helical interface sequence
QRGKDKCARDIGYYLRMVTYCLIAG

SEQ ID NO: 2288 - protein, 29 aa, Artificial
  helical interface sequence
KRKEQEAKKKLLAYLKYIPEVSRSLATFL

SEQ ID NO: 2289 - protein, 9 aa, Artificial
  helical interface sequence
ATGTEILKN

SEQ ID NO: 2290 - protein, 23 aa, Artificial
  helical interface sequence
TIISVALIYMVQVQMSKFSELGG

SEQ ID NO: 2291 - protein, 8 aa, Artificial
  helical interface sequence
ASVDRYYH

SEQ ID NO: 2292 - protein, 8 aa, Artificial
  helical interface sequence
RKLAVNMV

SEQ ID NO: 2293 - protein, 22 aa, Artificial
  helical interface sequence
QKSTQNAIDGITNKVNSVIEKM

SEQ ID NO: 2294 - protein, 21 aa, Artificial
  helical interface sequence
SRKMLEEIMKYEASILTHDSS

SEQ ID NO: 2295 - protein, 6 aa, Artificial
  helical interface sequence
INEVIH

SEQ ID NO: 2296 - protein, 10 aa, Artificial
  helical interface sequence
FEYRARVVRE

SEQ ID NO: 2297 - protein, 10 aa, Artificial
  helical interface sequence
LLVQRTIART

SEQ ID NO: 2298 - protein, 24 aa, Artificial
  helical interface sequence
AIGKAKCARDIGYYLRMVTYCLVV

SEQ ID NO: 2299 - protein, 27 aa, Artificial
  helical interface sequence
STEIQVAFGRFRQAKAGLEAAKALTSK

SEQ ID NO: 2300 - protein, 22 aa, Artificial
  helical interface sequence
MDTVLDVATEVTFYGLEQYEEY

SEQ ID NO: 2301 - protein, 12 aa, Artificial
  helical interface sequence
MYDANMVKAAVL

SEQ ID NO: 2302 - protein, 12 aa, Artificial
  helical interface sequence
LLVALENQHTID

SEQ ID NO: 2303 - protein, 29 aa, Artificial
  helical interface sequence
SKAMSIMNSFVNDVFERIAGEASRLAHYN

SEQ ID NO: 2304 - protein, 23 aa, Artificial
  helical interface sequence
PKMYVQTVLDVHKKYNALVMSAF

SEQ ID NO: 2305 - protein, 32 aa, Artificial; identical to SEQ ID NO: 796
  helical interface sequence

SEQ ID NO: 2306 - protein, 13 aa, Artificial
  helical interface sequence
EKELNRIKRWCIM

SEQ ID NO: 2307 - protein, 23 aa, Artificial
  helical interface sequence
TILPAIILILIALPSLRILYMMD

SEQ ID NO: 2308 - protein, 25 aa, Artificial
  helical interface sequence
PKEQAIGLSVTFLSFLLPAGWVLYH

SEQ ID NO: 2309 - protein, 21 aa, Artificial
  helical interface sequence
PDFRANLDAFAAGINAYAQQN

SEQ ID NO: 2310 - protein, 6 aa, Artificial
  helical interface sequence
YQNLHT

SEQ ID NO: 2311 - protein, 7 aa, Artificial
  helical interface sequence
IIANMLQ

SEQ ID NO: 2312 - protein, 28 aa, Artificial
  helical interface sequence
PEFLEQKRAEVDTVCRHNYEIFDNFLVP

SEQ ID NO: 2313 - protein, 28 aa, Artificial
  helical interface sequence
PEFLEQKRAEVDTVCRHNYEIFDNFLVP

SEQ ID NO: 2314 - protein, 17 aa, Artificial
  helical interface sequence
QHLHTLLDLYDKINTKS

SEQ ID NO: 2315 - protein, 21 aa, Artificial
  helical interface sequence
RKLLSAAKILADATAKMVEAA

SEQ ID NO: 2316 - protein, 29 aa, Artificial
  helical interface sequence
GWLIRSIHRWSASMMVLMMILHVFRVYLT

SEQ ID NO: 2317 - protein, 10 aa, Artificial
  helical interface sequence
WAQIFILDCL

SEQ ID NO: 2318 - protein, 19 aa, Artificial
  helical interface sequence
FQEFLILVIKMGVAAHKKS

SEQ ID NO: 2319 - protein, 13 aa, Artificial
  helical interface sequence
FHRRELWEAIEAG

SEQ ID NO: 2320 - protein, 34 aa, Artificial; identical to SEQ ID NO: 1952
  helical interface sequence

SEQ ID NO: 2321 - protein, 20 aa, Artificial
  helical interface sequence
PEFQGHVVRVMGGLDILINA

SEQ ID NO: 2322 - protein, 10 aa, Artificial
  helical interface sequence
AVTWAMKELL

SEQ ID NO: 2323 - protein, 18 aa, Artificial
  helical interface sequence
ELAKHAVSEGTKAVTKYT

SEQ ID NO: 2324 - protein, 23 aa, Artificial
  helical interface sequence
RDEYYHLLAEKIYKIQKELEEKR

SEQ ID NO: 2325 - protein, 21 aa, Artificial
  helical interface sequence
DDLQQIHTGIMLSTRLLNDVN

SEQ ID NO: 2326 - protein, 10 aa, Artificial
  helical interface sequence
LFCCLLRSRL

SEQ ID NO: 2327 - protein, 19 aa, Artificial
  helical interface sequence
GLQNCATHTQPFWGSLTNR

SEQ ID NO: 2328 - protein, 27 aa, Artificial
  helical interface sequence
PEETTCSEHCLQKYLKMTQRISMRFQE

SEQ ID NO: 2329 - protein, 13 aa, Artificial
  helical interface sequence
LQHLCRLTINKCT

SEQ ID NO: 2330 - protein, 12 aa, Artificial
  helical interface sequence
FEELKQRVERLY

SEQ ID NO: 2331 - protein, 18 aa, Artificial
  helical interface sequence
LTELHNKIVEMRERVASG

SEQ ID NO: 2332 - protein, 18 aa, Artificial
  helical interface sequence
EFAEFYNRLKQIKEFHRK

SEQ ID NO: 2333 - protein, 18 aa, Artificial
  helical interface sequence
PAELIERLEQAWMNEKFA

SEQ ID NO: 2334 - protein, 20 aa, Artificial
  helical interface sequence
AEEMEWFNNYKRSLATYMRS

SEQ ID NO: 2335 - protein, 24 aa, Artificial
  helical interface sequence
PERRKPREEGLRHCLQIGVEALKA

SEQ ID NO: 2336 - protein, 5 aa, Artificial
  helical interface sequence
FRQHY

SEQ ID NO: 2337 - protein, 14 aa, Artificial
  helical interface sequence
RSTVAQLVKRLTDA

SEQ ID NO: 2338 - protein, 21 aa, Artificial
  helical interface sequence
KLLILQQAVQVILGLEQQVRE

SEQ ID NO: 2339 - protein, 27 aa, Artificial
  helical interface sequence
STEIQVAFGRFRQAAAGLSAATALTSA

SEQ ID NO: 2340 - protein, 25 aa, Artificial
  helical interface sequence
QRGKDKCARDIGYYLRMVTYCLIAG

SEQ ID NO: 2341 - protein, 11 aa, Artificial
  helical interface sequence
WQSYVDNLMCD

SEQ ID NO: 2342 - protein, 15 aa, Artificial
  helical interface sequence
HTIEFFEMCANLIKI

SEQ ID NO: 2343 - protein, 32 aa, Artificial
  helical interface sequence
SEDRKGFSYLVTATACVATAYAAKNVVTQFIS

SEQ ID NO: 2344 - protein, 21 aa, Artificial
  helical interface sequence
AARRRARECAVQALYSWQLSQ

SEQ ID NO: 2345 - protein, 25 aa, Artificial
  helical interface sequence
TRRYAACIRDLDYYLRYATYAMLAG

SEQ ID NO: 2346 - protein, 11 aa, Artificial
  helical interface sequence
LQYLALAALIK

SEQ ID NO: 2347 - protein, 16 aa, Artificial
  helical interface sequence
PEELIALHDANISRYG

SEQ ID NO: 2348 - protein, 16 aa, Artificial
  helical interface sequence
AQVPLGAGIALACKYN

SEQ ID NO: 2349 - protein, 15 aa, Artificial
  helical interface sequence
ERQYYQLFLNLLEAQ

SEQ ID NO: 2350 - protein, 10 aa, Artificial
  helical interface sequence
NFKNYLKYLE

SEQ ID NO: 2351 - protein, 23 aa, Artificial
  helical interface sequence
VYPGMAGMGLFVLFPLVCTIAIA

SEQ ID NO: 2352 - protein, 23 aa, Artificial
  helical interface sequence
VYPGMAGMGLFVLFPLVCTIAIA

SEQ ID NO: 2353 - protein, 23 aa, Artificial
  helical interface sequence
VDQVVVRGIDTLQKKVASILLAL

SEQ ID NO: 2354 - protein, 32 aa, Artificial; identical to SEQ ID NO: 990
  helical interface sequence

SEQ ID NO: 2355 - protein, 39 aa, Artificial; identical to SEQ ID NO: 244
  helical interface sequence

SEQ ID NO: 2356 - protein, 25 aa, Artificial
  helical interface sequence
TRRYAACIRDLDYYLRYATYAMLAG

SEQ ID NO: 2357 - protein, 18 aa, Artificial
  helical interface sequence
QDESGAAAIFTVQLDDYL

SEQ ID NO: 2358 - protein, 22 aa, Artificial
  helical interface sequence
MDVVKDVATEVTLYGLEQYERY

SEQ ID NO: 2359 - protein, 18 aa, Artificial
  helical interface sequence
ERVQKHLKALTSELANAR

SEQ ID NO: 2360 - protein, 15 aa, Artificial
  helical interface sequence
SDYNRTVMRNWTGKW

SEQ ID NO: 2361 - protein, 25 aa, Artificial
  helical interface sequence
QRGKDKCARDIGYYLRMVTYCLIAG

SEQ ID NO: 2362 - protein, 13 aa, Artificial
  helical interface sequence
DAWASRILLEEMG

SEQ ID NO: 2363 - protein, 14 aa, Artificial
  helical interface sequence
AKNYGRAVYECLRG

SEQ ID NO: 2364 - protein, 20 aa, Artificial
  helical interface sequence
WRDRFLFVAEAIYKAQAETG

SEQ ID NO: 2365 - protein, 12 aa, Artificial
  helical interface sequence
EEELSDLFRMFD

SEQ ID NO: 2366 - protein, 25 aa, Artificial
  helical interface sequence
NGDLYQGAIFLLILASLALFAGWLH

SEQ ID NO: 2367 - protein, 26 aa, Artificial
  helical interface sequence
DTQVYVALVIALLPAVLAFRLSTELY

SEQ ID NO: 2368 - protein, 11 aa, Artificial
  helical interface sequence
KPAIRRLARRG

SEQ ID NO: 2369 - protein, 18 aa, Artificial
  helical interface sequence
NEFTTHILEVINAHMVLS

SEQ ID NO: 2370 - protein, 14 aa, Artificial
  helical interface sequence
HVNQEVIKRMLNLE

SEQ ID NO: 2371 - protein, 25 aa, Artificial
  helical interface sequence
NRRMAACLRDMEIILRYVSYAIIAG

SEQ ID NO: 2372 - protein, 11 aa, Artificial
  helical interface sequence
LDDQVALLRAH

SEQ ID NO: 2373 - protein, 21 aa, Artificial
  helical interface sequence
RTIESILEPVAQQISHLVIMH

SEQ ID NO: 2374 - protein, 13 aa, Artificial
  helical interface sequence
NSVWNQRYFVISN

SEQ ID NO: 2375 - protein, 15 aa, Artificial
  helical interface sequence
KSARIYLVFHKLEEL

SEQ ID NO: 2376 - protein, 26 aa, Artificial
  helical interface sequence
EMLYAALLSFGLIFVGWGLGVLLLKI

SEQ ID NO: 2377 - protein, 15 aa, Artificial
  helical interface sequence
MVVANRVAALSEIAE

SEQ ID NO: 2378 - protein, 10 aa, Artificial
  helical interface sequence
IFIPRLLMVD

SEQ ID NO: 2379 - protein, 18 aa, Artificial
  helical interface sequence
ELAKHAVSEGTKAVTKYT

SEQ ID NO: 2380 - protein, 17 aa, Artificial
  helical interface sequence
QKEIDRLNEVAKNLNES

SEQ ID NO: 2381 - protein, 9 aa, Artificial
  helical interface sequence
RGQSEYFDR

SEQ ID NO: 2382 - protein, 32 aa, Artificial; identical to SEQ ID NO: 1262
  helical interface sequence

SEQ ID NO: 2383 - protein, 20 aa, Artificial
  helical interface sequence
RAQLVDMKRLEVDIDIKIRS

SEQ ID NO: 2384 - protein, 29 aa, Artificial
  helical interface sequence
ISTELSKVNASLQNTVKYIKESNHQLQSV

SEQ ID NO: 2385 - protein, 20 aa, Artificial
  helical interface sequence
YALRAIHWETVTTVALIQAG

SEQ ID NO: 2386 - protein, 29 aa, Artificial
  helical interface sequence
SKAMGIMNSFVNDIFERIAGEASRLAHYN

SEQ ID NO: 2387 - protein, 12 aa, Artificial
  helical interface sequence
TRHRKFVEHVLD

SEQ ID NO: 2388 - protein, 17 aa, Artificial
  helical interface sequence
RFETKALADAKAALEAL

SEQ ID NO: 2389 - protein, 12 aa, Artificial
  helical interface sequence
SFISILIFKGLF

SEQ ID NO: 2390 - protein, 25 aa, Artificial
  helical interface sequence
QRGKDKCARDIGYYLRMVTYCLIAG

SEQ ID NO: 2391 - protein, 12 aa, Artificial
  helical interface sequence
GWQSYVDNLMCD

SEQ ID NO: 2392 - protein, 25 aa, Artificial
  helical interface sequence
NRRMAACLRDGEIVLRYVTYALLAG

SEQ ID NO: 2393 - protein, 10 aa, Artificial
  helical interface sequence
LISWLSFSVL

SEQ ID NO: 2394 - protein, 19 aa, Artificial
  helical interface sequence
LECLRLLNEIIADFDDLLS

SEQ ID NO: 2395 - protein, 28 aa, Artificial
  helical interface sequence
FNKVNDHLYSMGYNIGCRLIEDFLARTA

SEQ ID NO: 2396 - protein, 14 aa, Artificial
  helical interface sequence
LNGRARLVAETYLS

SEQ ID NO: 2397 - protein, 15 aa, Artificial
  helical interface sequence
DDIKEEFRRQTLRTF

SEQ ID NO: 2398 - protein, 9 aa, Artificial
  helical interface sequence
NFKNYLKYL

SEQ ID NO: 2399 - protein, 18 aa, Artificial
  helical interface sequence
QTEVMKRLVNLGKASEGC

SEQ ID NO: 2400 - protein, 7 aa, Artificial
  helical interface sequence
AAMNGLA

SEQ ID NO: 2401 - protein, 5 aa, Artificial
  helical interface sequence
AILAA

SEQ ID NO: 2402 - protein, 25 aa, Artificial
  helical interface sequence
NRRMAACLRDGEIILRYVSYALLAG

SEQ ID NO: 2403 - protein, 34 aa, Artificial
  helical interface sequence
HPYITIGQLASVLYFLLILVLMPTAGTIENKLLK

SEQ ID NO: 2404 - protein, 22 aa, Artificial
  helical interface sequence
ATDVTTLNEMFRYKTNLYKLKE

SEQ ID NO: 2405 - protein, 25 aa, Artificial
  helical interface sequence
QRGKDKCARDIGYYLRMVTYCLIAG

SEQ ID NO: 2406 - protein, 12 aa, Artificial
  helical interface sequence
AFTKVVSQADTR

SEQ ID NO: 2407 - protein, 12 aa, Artificial
  helical interface sequence
DEEVDEMIREAD

SEQ ID NO: 2408 - protein, 22 aa, Artificial
  helical interface sequence
AQGALANIAVDKANLEIMTKRS

SEQ ID NO: 2409 - protein, 22 aa, Artificial
  helical interface sequence
ASAIAFDKSFCEMLMREVSPKL

SEQ ID NO: 2410 - protein, 6 aa, Artificial
  helical interface sequence
SDGFIS

SEQ ID NO: 2411 - protein, 22 aa, Artificial
  helical interface sequence
PRMNNMSFWLLPPSFLLLLASS

SEQ ID NO: 2412 - protein, 15 aa, Artificial
  helical interface sequence
NVRFVGFEINEYLHK

SEQ ID NO: 2413 - protein, 12 aa, Artificial
  helical interface sequence
AEHENQYFRDVV

SEQ ID NO: 2414 - protein, 18 aa, Artificial
  helical interface sequence
AEVAETKVAMVNKYAREN

SEQ ID NO: 2415 - protein, 14 aa, Artificial
  helical interface sequence
AKNYGRAVYECLRG

SEQ ID NO: 2416 - protein, 11 aa, Artificial
  helical interface sequence
PQDIIKNARSF

SEQ ID NO: 2417 - protein, 17 aa, Artificial
  helical interface sequence
FEEFIMLMARLTWASHE

SEQ ID NO: 2418 - protein, 28 aa, Artificial
  helical interface sequence
KGALAVILVLTLTILVFWLGVYAVFFAR

SEQ ID NO: 2419 - protein, 12 aa, Artificial
  helical interface sequence
PETLHNVMWAMS

SEQ ID NO: 2420 - protein, 23 aa, Artificial
  helical interface sequence
AADCQFWETWLGSQCRLHELREK

SEQ ID NO: 2421 - protein, 8 aa, Artificial
  helical interface sequence
TFLMEMLE

SEQ ID NO: 2422 - protein, 26 aa, Artificial
  helical interface sequence
LMFPRMLMKLVSLRTLSSVHSEQVFA

SEQ ID NO: 2423 - protein, 68 aa, Artificial; identical to SEQ ID NO: 497
  helical interface sequence

SEQ ID NO: 2424 - protein, 20 aa, Artificial
  helical interface sequence
NTASIAQARKLVEQLKMEAN

SEQ ID NO: 2425 - protein, 23 aa, Artificial
  helical interface sequence
PFQQVVKDTKEQLNRINNYITRH

SEQ ID NO: 2426 - protein, 83 aa, Artificial; identical to SEQ ID NO: 106
  helical interface sequence

SEQ ID NO: 2427 - protein, 29 aa, Artificial
  helical interface sequence
SKAMSIMNSFVNDVFERIAGEASRLAHYN

SEQ ID NO: 2428 - protein, 18 aa, Artificial
  helical interface sequence
QDESGAAAIFTVQLDDYL

SEQ ID NO: 2429 - protein, 22 aa, Artificial
  helical interface sequence
FNEFDNLRRGGIQFADTRGYAY

SEQ ID NO: 2430 - protein, 17 aa, Artificial
  helical interface sequence
SHVLSKVCMYFTYKVRY

SEQ ID NO: 2431 - protein, 11 aa, Artificial
  helical interface sequence
RQVFLATWKDI

SEQ ID NO: 2432 - protein, 6 aa, Artificial
  helical interface sequence
HQDWLN

SEQ ID NO: 2433 - protein, 11 aa, Artificial
  helical interface sequence
RDLADVKSSLV

SEQ ID NO: 2434 - protein, 14 aa, Artificial
  helical interface sequence
FEDFVTALSILLRG

SEQ ID NO: 2435 - protein, 15 aa, Artificial
  helical interface sequence
KRELQVLYRGFKNEC

SEQ ID NO: 2436 - protein, 25 aa, Artificial
  helical interface sequence
PEGLRVFYYLVQDLKCLVFSLIGLH

SEQ ID NO: 2437 - protein, 26 aa, Artificial
  helical interface sequence
MEGIHRWAIWMAVLVTLTGGIGILLS

SEQ ID NO: 2438 - protein, 10 aa, Artificial
  helical interface sequence
LMNVLKKIYE

SEQ ID NO: 2439 - protein, 8 aa, Artificial
  helical interface sequence
LDEMRHFY

SEQ ID NO: 2440 - protein, 18 aa, Artificial
  helical interface sequence
LSSSISQLKRIQRDFKGL

SEQ ID NO: 2441 - protein, 28 aa, Artificial
  helical interface sequence
AWAMWTRAWTAEENRHGDLLNKYLYLSG

SEQ ID NO: 2442 - protein, 12 aa, Artificial
  helical interface sequence
FYKVYTVVDEMF

SEQ ID NO: 2443 - protein, 42 aa, Artificial
  helical interface sequence
DEEAEHVWAVVQRDFDLRRREEERLQGLKGKIQKESSKRELL

SEQ ID NO: 2444 - protein, 8 aa, Artificial
  helical interface sequence
RIKELRNL

SEQ ID NO: 2445 - protein, 23 aa, Artificial
  helical interface sequence
WFGVIMIPTLLAATICFVIAFIA

SEQ ID NO: 2446 - protein, 30 aa, Artificial
  helical interface sequence
KVKQLEDAVEELLSANYHLENAVARLKKLV

SEQ ID NO: 2447 - protein, 21 aa, Artificial
  helical interface sequence
AARRRARECAVQALYSWQLSQ

SEQ ID NO: 2448 - protein, 10 aa, Artificial
  helical interface sequence
IRERMLYSSC

SEQ ID NO: 2449 - protein, 21 aa, Artificial
  helical interface sequence
PGNRNMATFGMMDELRHGQLQ

SEQ ID NO: 2450 - protein, 14 aa, Artificial
  helical interface sequence
GPLFNTDYDILKSN

SEQ ID NO: 2451 - protein, 5 aa, Artificial
  helical interface sequence
TYYMS

SEQ ID NO: 2452 - protein, 11 aa, Artificial
  helical interface sequence
RQFDWAWRAYH

SEQ ID NO: 2453 - protein, 19 aa, Artificial
  helical interface sequence
YLKAQKVRRLITNDFLKAF

SEQ ID NO: 2454 - protein, 10 aa, Artificial
  helical interface sequence
LLVQRTIART

SEQ ID NO: 2455 - protein, 12 aa, Artificial
  helical interface sequence
VITTTISAADAA

SEQ ID NO: 2456 - protein, 14 aa, Artificial
  helical interface sequence
VSKCCEEFRDYVEE

SEQ ID NO: 2457 - protein, 19 aa, Artificial
  helical interface sequence
ISSYYDELIEMTSYWHLLG

SEQ ID NO: 2458 - protein, 26 aa, Artificial
  helical interface sequence
PFHMLSIAFLYGSALLFAMHGATILS

SEQ ID NO: 2459 - protein, 26 aa, Artificial
  helical interface sequence
PTWRDEFINRYWGAFLFNEYGLFNAH

SEQ ID NO: 2460 - protein, 47 aa, Artificial; identical to SEQ ID NO: 1689
  helical interface sequence

SEQ ID NO: 2461 - protein, 47 aa, Artificial; identical to SEQ ID NO: 1689
  helical interface sequence

SEQ ID NO: 2462 - protein, 19 aa, Artificial
  helical interface sequence
HQSLIEASNFIATIEERQG

SEQ ID NO: 2463 - protein, 21 aa, Artificial
  helical interface sequence
NAPGAAANRVALEACTQARNE

SEQ ID NO: 2464 - protein, 13 aa, Artificial
  helical interface sequence
NKEQQNAFYEILH

SEQ ID NO: 2465 - protein, 21 aa, Artificial
  helical interface sequence
DYQYIERKIEEKLSVLKTEKL

SEQ ID NO: 2466 - protein, 25 aa, Artificial
  helical interface sequence
PKWNETMKVVSNFLEVGEYNAIAAT

SEQ ID NO: 2467 - protein, 26 aa, Artificial
  helical interface sequence
IAQLVWYAQWLVIWTVVLLYLRREDR

SEQ ID NO: 2468 - protein, 23 aa, Artificial
  helical interface sequence
AGIAIELVRLFAVELEHYEKIEG

SEQ ID NO: 2469 - protein, 22 aa, Artificial
  helical interface sequence
YNEFENLRRAGIVHADMRGYSY

SEQ ID NO: 2470 - protein, 28 aa, Artificial
  helical interface sequence
GWLIRSIHRWSASMMVLMMVLHVFRVYL

SEQ ID NO: 2471 - protein, 13 aa, Artificial
  helical interface sequence
FQVEYALEAVKRG

SEQ ID NO: 2472 - protein, 10 aa, Artificial
  helical interface sequence
TNETTKSIER

SEQ ID NO: 2473 - protein, 21 aa, Artificial
  helical interface sequence
PAEVEALREKVYASLEAYCKH

SEQ ID NO: 2474 - protein, 20 aa, Artificial
  helical interface sequence
ENLEQVSGIIGNLRHMALDM

SEQ ID NO: 2475 - protein, 25 aa, Artificial
  helical interface sequence
GATVCVLGLLLGEWINRYFNFWGWT

SEQ ID NO: 2476 - protein, 11 aa, Artificial
  helical interface sequence
FQVEYAVKAVE

SEQ ID NO: 2477 - protein, 49 aa, Artificial
  helical interface sequence
QKQIANQFNKAISQIQESLTTTSTALGKLQDVVNQNAQALNTLVKQLSS

SEQ ID NO: 2478 - protein, 13 aa, Artificial
  helical interface sequence
TAAQITQRKWEAA

SEQ ID NO: 2479 - protein, 20 aa, Artificial
  helical interface sequence
KGESVCLDRCVSKYLDIHER

SEQ ID NO: 2480 - protein, 11 aa, Artificial
  helical interface sequence
WSKKNELFSNL

SEQ ID NO: 2481 - protein, 11 aa, Artificial
  helical interface sequence
YTDFVRLTVKH

SEQ ID NO: 2482 - protein, 14 aa, Artificial
  helical interface sequence
RRQKRLIFSTITSK

SEQ ID NO: 2483 - protein, 28 aa, Artificial
  helical interface sequence
GWLIRSIHRWSASMMVLMMILHVFRVYL

SEQ ID NO: 2484 - protein, 22 aa, Artificial
  helical interface sequence
FNEFDNLRRGGIQFADTRGYAY

SEQ ID NO: 2485 - protein, 29 aa, Artificial
  helical interface sequence
SSAVMALQEASEAYLVALFEDTNLCAIHA

SEQ ID NO: 2486 - protein, 29 aa, Artificial
  helical interface sequence
DSMLAAARAWRSLDVEMTAVQRSFNRTLL

SEQ ID NO: 2487 - protein, 6 aa, Artificial
  helical interface sequence
FAALAG

SEQ ID NO: 2488 - protein, 14 aa, Artificial
  helical interface sequence
FGELKQRVERLYSG

SEQ ID NO: 2489 - protein, 12 aa, Artificial
  helical interface sequence
HHFVRALVRVCG

SEQ ID NO: 2490 - protein, 31 aa, Artificial; identical to SEQ ID NO: 1674
  helical interface sequence

SEQ ID NO: 2491 - protein, 19 aa, Artificial
  helical interface sequence
PQRAIAWWGIRMVRDLNMN

SEQ ID NO: 2492 - protein, 5 aa, Artificial
  helical interface sequence
ERKYR

SEQ ID NO: 2493 - protein, 22 aa, Artificial
  helical interface sequence
MNEFTTHILEVINAHMVLSKAN

SEQ ID NO: 2494 - protein, 34 aa, Artificial
  helical interface sequence
PTELFFHAAGGREGLVDTAVRTSQSGYMQRRLIN

SEQ ID NO: 2495 - protein, 19 aa, Artificial
  helical interface sequence
EDENILRNAVNLQVLKFHY

SEQ ID NO: 2496 - protein, 16 aa, Artificial
  helical interface sequence
YAWRYVYPGMAGMGLF

SEQ ID NO: 2497 - protein, 15 aa, Artificial
  helical interface sequence
FFIAKGVVDRVAEKL

SEQ ID NO: 2498 - protein, 25 aa, Artificial
  helical interface sequence
QRGKDKCARDIGYYLRMVTYCLIAG

SEQ ID NO: 2499 - protein, 20 aa, Artificial
  helical interface sequence
NAERLKRLQKSADLYKDRLG

SEQ ID NO: 2500 - protein, 25 aa, Artificial
  helical interface sequence
EKMTALCLRDLDYYLRLVTYGIVAG

SEQ ID NO: 2501 - protein, 18 aa, Artificial
  helical interface sequence
LNTWVLISNFKVAYNILR

SEQ ID NO: 2502 - protein, 30 aa, Artificial; identical to SEQ ID NO: 2061
  helical interface sequence

SEQ ID NO: 2503 - protein, 25 aa, Artificial
  helical interface sequence
SQEEQCLSNCVNRFLDTNIRIVNGL

SEQ ID NO: 2504 - protein, 30 aa, Artificial; identical to SEQ ID NO: 1011
  helical interface sequence

SEQ ID NO: 2505 - protein, 31 aa, Artificial
  helical interface sequence
TSTFALTVVLGAVLFERAFDQGADAIFEHLN

SEQ ID NO: 2506 - protein, 19 aa, Artificial
  helical interface sequence
PVLSKLCVPVANQFINLAG

SEQ ID NO: 2507 - protein, 34 aa, Artificial
  helical interface sequence
EESRLSAYYNLLHCLRRDSHKIDNYLKLLKCRII

SEQ ID NO: 2508 - protein, 32 aa, Artificial
  helical interface sequence
FGVVLVILAVTSVYFFVLDFIFSGVVSAIFKA

SEQ ID NO: 2509 - protein, 9 aa, Artificial
  helical interface sequence
FEDLLDYYG

SEQ ID NO: 2510 - protein, 14 aa, Artificial
  helical interface sequence
LNGRARLVAETYLS

SEQ ID NO: 2511 - protein, 11 aa, Artificial
  helical interface sequence
ADAVACAKRVV

SEQ ID NO: 2512 - protein, 22 aa, Artificial
  helical interface sequence
KDNTDAVEVLTELNTKVERAAL

SEQ ID NO: 2513 - protein, 10 aa, Artificial
  helical interface sequence
EKELLDSYID

SEQ ID NO: 2514 - protein, 15 aa, Artificial
  helical interface sequence
VSDRAWALFRALDGK

SEQ ID NO: 2515 - protein, 27 aa, Artificial
  helical interface sequence
FHPYYTIKDILGALLLILALMLLVLFA

SEQ ID NO: 2516 - protein, 12 aa, Artificial
  helical interface sequence
TRKLTRLLREKG

SEQ ID NO: 2517 - protein, 16 aa, Artificial
  helical interface sequence
QDYKDMLAKKRDGFEE

SEQ ID NO: 2518 - protein, 30 aa, Artificial; identical to SEQ ID NO: 567
  helical interface sequence

SEQ ID NO: 2519 - protein, 25 aa, Artificial
  helical interface sequence
SRRMAACLRDMEIILRYVTYAVFAG

SEQ ID NO: 2520 - protein, 16 aa, Artificial
  helical interface sequence
NNNMNLGLQNASALYK

SEQ ID NO: 2521 - protein, 19 aa, Artificial
  helical interface sequence
HQSLIEASNFIATIEERQG

SEQ ID NO: 2522 - protein, 11 aa, Artificial
  helical interface sequence
GGALLCAIHGA

SEQ ID NO: 2523 - protein, 11 aa, Artificial
  helical interface sequence
GKTKDIVNGLR

SEQ ID NO: 2524 - protein, 17 aa, Artificial
  helical interface sequence
AIIAPVMILLVGILLPL

SEQ ID NO: 2525 - protein, 28 aa, Artificial
  helical interface sequence
PEFLEQKRAEVDTVCRHNYEIFDNFLVP

SEQ ID NO: 2526 - protein, 25 aa, Artificial
  helical interface sequence
NRRMAACLRDGEIILRYVSYALLAG

SEQ ID NO: 2527 - protein, 43 aa, Artificial; identical to SEQ ID NO: 26
  helical interface sequence

SEQ ID NO: 2528 - protein, 9 aa, Artificial
  helical interface sequence
WGERMWLAE

SEQ ID NO: 2529 - protein, 7 aa, Artificial
  helical interface sequence
TSLYIFK

SEQ ID NO: 2530 - protein, 31 aa, Artificial
  helical interface sequence
ASVDLTIFSLHLAGVSSILGAINFITTIINM

SEQ ID NO: 2531 - protein, 22 aa, Artificial
  helical interface sequence
YNEFENLRRAGIVHADMRGYSY

SEQ ID NO: 2532 - protein, 35 aa, Artificial
  helical interface sequence
PARIQGLLVFFSFVLLTQVLLVLKKKQFEKVQLAE

SEQ ID NO: 2533 - protein, 6 aa, Artificial
  helical interface sequence
YQNLHT

SEQ ID NO: 2534 - protein, 14 aa, Artificial
  helical interface sequence
TDQLARQVDYLLNN

SEQ ID NO: 2535 - protein, 11 aa, Artificial
  helical interface sequence
YQVEYAFKATN

SEQ ID NO: 2536 - protein, 18 aa, Artificial
  helical interface sequence
PEDLFETISQALLNAADR

SEQ ID NO: 2537 - protein, 51 aa, Artificial
  helical interface sequence
RIRRERNKMAAAKCRNRRRELTDTLQAETDQLEDEKSALQTEIANLLKEKE

SEQ ID NO: 2538 - protein, 7 aa, Artificial
  helical interface sequence
EWWRSGN

SEQ ID NO: 2539 - protein, 7 aa, Artificial
  helical interface sequence
VEEFMSL

SEQ ID NO: 2540 - protein, 29 aa, Artificial
  helical interface sequence
GLIYEETRGVLKVFLENVIRDAVTYTEHA

SEQ ID NO: 2541 - protein, 29 aa, Artificial
  helical interface sequence
SKAMGIMNSFVNDIFERIASEASRLAHYN

SEQ ID NO: 2542 - protein, 11 aa, Artificial
  helical interface sequence
PYVRKTAAVCV

SEQ ID NO: 2543 - protein, 23 aa, Artificial
  helical interface sequence
AQLIAQSIGQAFSVAYQEFLRAN

SEQ ID NO: 2544 - protein, 15 aa, Artificial
  helical interface sequence
KDTKEEILKAFKLFD

SEQ ID NO: 2545 - protein, 13 aa, Artificial
  helical interface sequence
TAAQITQRKWEAA

SEQ ID NO: 2546 - protein, 13 aa, Artificial
  helical interface sequence
YQQLKVRVEHQMD

SEQ ID NO: 2547 - protein, 25 aa, Artificial
  helical interface sequence
NRRMAACLRDMEIVLRYVSYAEIAG

SEQ ID NO: 2548 - protein, 29 aa, Artificial
  helical interface sequence
SSAVMALQEASEAYLVGLFEDTNLCAIHA

SEQ ID NO: 2549 - protein, 18 aa, Artificial
  helical interface sequence
ELAKHAVSEGTKAVTKYT

SEQ ID NO: 2550 - protein, 11 aa, Artificial
  helical interface sequence
KPAIRRLARRG

SEQ ID NO: 2551 - protein, 15 aa, Artificial
  helical interface sequence
PKSLAEVKEHLKRIL

SEQ ID NO: 2552 - protein, 13 aa, Artificial
  helical interface sequence
GEYRRRWKREVLG

SEQ ID NO: 2553 - protein, 11 aa, Artificial
  helical interface sequence
VDDVLKFTFTG

SEQ ID NO: 2554 - protein, 8 aa, Artificial
  helical interface sequence
LEEVLAIS

SEQ ID NO: 2555 - protein, 10 aa, Artificial
  helical interface sequence
RNEMRALVCG

SEQ ID NO: 2556 - protein, 29 aa, Artificial
  helical interface sequence
ADDLDQFIKNYLDIRTQYHLRREKLATWD

SEQ ID NO: 2557 - protein, 14 aa, Artificial
  helical interface sequence
NLEAQNLGNFIVKY

SEQ ID NO: 2558 - protein, 15 aa, Artificial
  helical interface sequence
PEQAKAALLDEILRA

SEQ ID NO: 2559 - protein, 16 aa, Artificial
  helical interface sequence
EAEFAAASVQRYELNM

SEQ ID NO: 2560 - protein, 32 aa, Artificial
  helical interface sequence
QKARLFITHLLLLLFIAAIMFPLLMVVAISLR

SEQ ID NO: 2561 - protein, 25 aa, Artificial
  helical interface sequence
QRGKDKCARDIGYYLRMVTYCLIAG

SEQ ID NO: 2562 - protein, 25 aa, Artificial
  helical interface sequence
NRRMAACLRDMEIILRYVSYALLAG

SEQ ID NO: 2563 - protein, 12 aa, Artificial
  helical interface sequence
TRELDELMASLS

SEQ ID NO: 2564 - protein, 15 aa, Artificial
  helical interface sequence
EEQIAEFKEAFSLFD

SEQ ID NO: 2565 - protein, 19 aa, Artificial
  helical interface sequence
EAAFAELFQHFAPKVKGFL

SEQ ID NO: 2566 - protein, 31 aa, Artificial; identical to SEQ ID NO: 749
  helical interface sequence

SEQ ID NO: 2567 - protein, 14 aa, Artificial
  helical interface sequence
ANQMLTDILSFMKS

SEQ ID NO: 2568 - protein, 5 aa, Artificial
  helical interface sequence
RLFDK

SEQ ID NO: 2569 - protein, 9 aa, Artificial
  helical interface sequence
LDALWDCLT

SEQ ID NO: 2570 - protein, 11 aa, Artificial
  helical interface sequence
LQYLALAALIK

SEQ ID NO: 2571 - protein, 9 aa, Artificial
  helical interface sequence
EFASLFDTL

SEQ ID NO: 2572 - protein, 15 aa, Artificial
  helical interface sequence
TDRIFGKVFLQEFVD

SEQ ID NO: 2573 - protein, 13 aa, Artificial
  helical interface sequence
PKGVINDWRKFKL

SEQ ID NO: 2574 - protein, 10 aa, Artificial
  helical interface sequence
SDLLGWWLCE

SEQ ID NO: 2575 - protein, 28 aa, Artificial
  helical interface sequence
SQMWLQLSQSLKGWDHMFTVDFWTIMEN

SEQ ID NO: 2576 - protein, 14 aa, Artificial
  helical interface sequence
PTARAALWQQICTY

SEQ ID NO: 2577 - protein, 25 aa, Artificial
  helical interface sequence
QRGKDKCARDIGYYLRMVTYCLIAG

SEQ ID NO: 2578 - protein, 27 aa, Artificial
  helical interface sequence
KDLLIQRLNWMLWVIDECFRDLCYRTG

SEQ ID NO: 2579 - protein, 21 aa, Artificial
  helical interface sequence
TDVIIAFQAQCRGYLARKAFA

SEQ ID NO: 2580 - protein, 13 aa, Artificial
  helical interface sequence
TVALREIRRFQKS

SEQ ID NO: 2581 - protein, 20 aa, Artificial
  helical interface sequence
WRDRFLFVAEAIYKAQAETG

SEQ ID NO: 2582 - protein, 14 aa, Artificial
  helical interface sequence
DEQIAAQVDYIVAN

SEQ ID NO: 2583 - protein, 20 aa, Artificial
  helical interface sequence
WRDRFLFVAEAIYKAQAETG

SEQ ID NO: 2584 - protein, 14 aa, Artificial
  helical interface sequence
DEQIKKQIDYMISK

SEQ ID NO: 2585 - protein, 6 aa, Artificial
  helical interface sequence
ERELLE

SEQ ID NO: 2586 - protein, 23 aa, Artificial
  helical interface sequence
VLSKFFFFIFVFNFVLLGQIGAC

SEQ ID NO: 2587 - protein, 30 aa, Artificial
  helical interface sequence
RLQQTQAQVEEVVDIMRVNVDKVLERDSKI

SEQ ID NO: 2588 - protein, 27 aa, Artificial
  helical interface sequence
PFHGLSIAFLYGSALLFAMHGATILAV

SEQ ID NO: 2589 - protein, 5 aa, Artificial
  helical interface sequence
PWWAN

SEQ ID NO: 2590 - protein, 10 aa, Artificial
  helical interface sequence
QWGERMWLAE

SEQ ID NO: 2591 - protein, 12 aa, Artificial
  helical interface sequence
FQQLKVRVEHQL

SEQ ID NO: 2592 - protein, 32 aa, Artificial; identical to SEQ ID NO: 1080
  helical interface sequence

SEQ ID NO: 2593 - protein, 31 aa, Artificial; identical to SEQ ID NO: 2530
  helical interface sequence

SEQ ID NO: 2594 - protein, 13 aa, Artificial
  helical interface sequence
GDNILRLYGEARG

SEQ ID NO: 2595 - protein, 10 aa, Artificial
  helical interface sequence
ISSRVMAAIE

SEQ ID NO: 2596 - protein, 26 aa, Artificial
  helical interface sequence
PEGLRVFYYLVQDLKCLVFSLIGLHF

SEQ ID NO: 2597 - protein, 22 aa, Artificial
  helical interface sequence
YNEFENLRRAGIVHADMRGYSY

SEQ ID NO: 2598 - protein, 16 aa, Artificial
  helical interface sequence
VKFLAITTDCLQILAY

SEQ ID NO: 2599 - protein, 17 aa, Artificial
  helical interface sequence
EKDKLKMEVDQLKKEVT

SEQ ID NO: 2600 - protein, 5 aa, Artificial
  helical interface sequence
VAFFY

SEQ ID NO: 2601 - protein, 15 aa, Artificial
  helical interface sequence
FDFTHREFRKLWSEG

SEQ ID NO: 2602 - protein, 14 aa, Artificial
  helical interface sequence
FITFLGALKSFLKG

SEQ ID NO: 2603 - protein, 23 aa, Artificial
  helical interface sequence
PWPLTGALSALLMTSGLTMWFHF

SEQ ID NO: 2604 - protein, 13 aa, Artificial
  helical interface sequence
LFNKLGVFQAAIL

SEQ ID NO: 2605 - protein, 7 aa, Artificial
  helical interface sequence
YLWERYR

SEQ ID NO: 2606 - protein, 34 aa, Artificial; identical to SEQ ID NO: 1952
  helical interface sequence

SEQ ID NO: 2607 - protein, 9 aa, Artificial
  helical interface sequence
AILYALLSS

SEQ ID NO: 2608 - protein, 49 aa, Artificial; identical to SEQ ID NO: 2477
  helical interface sequence

SEQ ID NO: 2609 - protein, 15 aa, Artificial
  helical interface sequence
KFNKELGWATWEIFN

SEQ ID NO: 2610 - protein, 74 aa, Artificial
  helical interface sequence
YENQKQIANQFNKAISQIQESLTTTSTALGKLQDVVNQNAQALNTLVKQLSSNFGAISSVLNDILSRLDKVEAE

SEQ ID NO: 2611 - protein, 16 aa, Artificial
  helical interface sequence
YYGRWLLTAARILVDK

SEQ ID NO: 2612 - protein, 83 aa, Artificial; identical to SEQ ID NO: 106
  helical interface sequence

SEQ ID NO: 2613 - protein, 7 aa, Artificial
  helical interface sequence
LDDILMS

SEQ ID NO: 2614 - protein, 19 aa, Artificial
  helical interface sequence
NADISQSLLQTFIGRFRRI

SEQ ID NO: 2615 - protein, 22 aa, Artificial
  helical interface sequence
FNEFDNLRRGGIQFADTRGYAY

SEQ ID NO: 2616 - protein, 10 aa, Artificial
  helical interface sequence
PRDAQHFTQR

SEQ ID NO: 2617 - protein, 10 aa, Artificial
  helical interface sequence
PRDAQHFTQR

SEQ ID NO: 2618 - protein, 19 aa, Artificial
  helical interface sequence
FQEFMAFVAMVTTACHEFF

SEQ ID NO: 2619 - protein, 16 aa, Artificial
  helical interface sequence
KLPFQRLVREIAQDFK

SEQ ID NO: 2620 - protein, 27 aa, Artificial
  helical interface sequence
PWHGFSIGFAYGCGLLFAAHGATILAV

SEQ ID NO: 2621 - protein, 25 aa, Artificial
  helical interface sequence
TLGIHRLGLLLSLSAVFFSALCMII

SEQ ID NO: 2622 - protein, 14 aa, Artificial
  helical interface sequence
TLDMLTVKVKLDEA

SEQ ID NO: 2623 - protein, 14 aa, Artificial
  helical interface sequence
TLDMLTVKVKLDEA

SEQ ID NO: 2624 - protein, 12 aa, Artificial
  helical interface sequence
QDVAEEVRAVLE

SEQ ID NO: 2625 - protein, 8 aa, Artificial
  helical interface sequence
KKLLTDVI

SEQ ID NO: 2626 - protein, 11 aa, Artificial
  helical interface sequence
EDELFRLSQLG

SEQ ID NO: 2627 - protein, 19 aa, Artificial
  helical interface sequence
AEEMEWFNNYKRSLATYMR

SEQ ID NO: 2628 - protein, 9 aa, Artificial
  helical interface sequence
LDDILMSHE

SEQ ID NO: 2629 - protein, 32 aa, Artificial; identical to SEQ ID NO: 462
  helical interface sequence

SEQ ID NO: 2630 - protein, 15 aa, Artificial
  helical interface sequence
PSWYLFQFHRLLQYA

SEQ ID NO: 2631 - protein, 25 aa, Artificial
  helical interface sequence
QRGKDKCARDIGYYLRMVTYCLIAG

SEQ ID NO: 2632 - protein, 9 aa, Artificial
  helical interface sequence
DRLRPLSYP

SEQ ID NO: 2633 - protein, 11 aa, Artificial
  helical interface sequence
YQVEYAFKATN

SEQ ID NO: 2634 - protein, 28 aa, Artificial
  helical interface sequence
PLLSGIVLGLIVVTLAGLFYAAYKQYKR

SEQ ID NO: 2635 - protein, 17 aa, Artificial
  helical interface sequence
PVTGLWMSAIGVVGLAL

SEQ ID NO: 2636 - protein, 13 aa, Artificial
  helical interface sequence
RDEDHIALIIELL

SEQ ID NO: 2637 - protein, 16 aa, Artificial
  helical interface sequence
ITLQEIIKTLNSLTEQ

SEQ ID NO: 2638 - protein, 23 aa, Artificial
  helical interface sequence
QEIYNSNNQKIVNLKEKVAQLEA

SEQ ID NO: 2639 - protein, 10 aa, Artificial
  helical interface sequence
SDLLGWWLCE

SEQ ID NO: 2640 - protein, 14 aa, Artificial
  helical interface sequence
TKALRGLCDVWEKW

SEQ ID NO: 2641 - protein, 30 aa, Artificial; identical to SEQ ID NO: 1011
  helical interface sequence

SEQ ID NO: 2642 - protein, 13 aa, Artificial
  helical interface sequence
ILNRKAIDFLLQR

SEQ ID NO: 2643 - protein, 23 aa, Artificial
  helical interface sequence
VGDFYYELGVQIIEVCLALKHRN

SEQ ID NO: 2644 - protein, 8 aa, Artificial
  helical interface sequence
FSDLWKLL

SEQ ID NO: 2645 - protein, 10 aa, Artificial
  helical interface sequence
GLIEASRAMG

SEQ ID NO: 2646 - protein, 13 aa, Artificial
  helical interface sequence
FQAQCRGYLARKA

SEQ ID NO: 2647 - protein, 14 aa, Artificial
  helical interface sequence
LDTVELVMALEEEF

SEQ ID NO: 2648 - protein, 16 aa, Artificial
  helical interface sequence
WVDKVKDLTKSEMNIN

SEQ ID NO: 2649 - protein, 17 aa, Artificial
  helical interface sequence
ISTVREVALLRRLEAFE

SEQ ID NO: 2650 - protein, 22 aa, Artificial
  helical interface sequence
KESTQKAIDGVTNKVNSIIDKM

SEQ ID NO: 2651 - protein, 31 aa, Artificial; identical to SEQ ID NO: 2064
  helical interface sequence

SEQ ID NO: 2652 - protein, 25 aa, Artificial
  helical interface sequence
NRRMAACLRDGEIILRYVSYALLAG

SEQ ID NO: 2653 - protein, 13 aa, Artificial
  helical interface sequence
YDALRRLLYMIYM

SEQ ID NO: 2654 - protein, 29 aa, Artificial
  helical interface sequence
CILRVAPPFVAFYLVYTWGTQEFEKSKRK

SEQ ID NO: 2655 - protein, 9 aa, Artificial
  helical interface sequence
ERELLESYI

SEQ ID NO: 2656 - protein, 9 aa, Artificial
  helical interface sequence
WNAYIDNLM

SEQ ID NO: 2657 - protein, 9 aa, Artificial
  helical interface sequence
QMQHWKEQR

SEQ ID NO: 2658 - protein, 14 aa, Artificial
  helical interface sequence
PWSKGFLASSYASR

SEQ ID NO: 2659 - protein, 14 aa, Artificial
  helical interface sequence
DTIIEFFMKYIEKS

SEQ ID NO: 2660 - protein, 20 aa, Artificial
  helical interface sequence
PENFKLLGNVLVVVLARNFG

SEQ ID NO: 2661 - protein, 25 aa, Artificial
  helical interface sequence
QRGKDKCARDIGYYLRMVTYCLIAG

SEQ ID NO: 2662 - protein, 15 aa, Artificial
  helical interface sequence
DKKLSKLIEEMELLF

SEQ ID NO: 2663 - protein, 24 aa, Artificial
  helical interface sequence
PDVVSYVSHATQQRLQNLVEKISE

SEQ ID NO: 2664 - protein, 15 aa, Artificial
  helical interface sequence
KEAFWDRCLSVINLM

SEQ ID NO: 2665 - protein, 21 aa, Artificial
  helical interface sequence
HKELAEHLMLVDLARNDLARI

SEQ ID NO: 2666 - protein, 14 aa, Artificial
  helical interface sequence
LEELERRTQYYREN

SEQ ID NO: 2667 - protein, 20 aa, Artificial
  helical interface sequence
ASRKLQLKTLLLQIAKQELE

SEQ ID NO: 2668 - protein, 12 aa, Artificial
  helical interface sequence
EALMKLELVHHG

SEQ ID NO: 2669 - protein, 32 aa, Artificial; identical to SEQ ID NO: 1402
  helical interface sequence

SEQ ID NO: 2670 - protein, 14 aa, Artificial
  helical interface sequence
SRYMELYTHVYNYC

SEQ ID NO: 2671 - protein, 24 aa, Artificial
  helical interface sequence
AAYLDDLRSKFLLENSVLKMEYAD

SEQ ID NO: 2672 - protein, 8 aa, Artificial
  helical interface sequence
YEEFVQMM

SEQ ID NO: 2673 - protein, 21 aa, Artificial
  helical interface sequence
QVSQILRVEVDIDVALRACKG

SEQ ID NO: 2674 - protein, 26 aa, Artificial
  helical interface sequence
PTWRDEFINRYWGAFLFNEYGLFNAH

SEQ ID NO: 2675 - protein, 12 aa, Artificial
  helical interface sequence
FQQLKVRVEHQL

SEQ ID NO: 2676 - protein, 22 aa, Artificial
  helical interface sequence
IPDARNAALRAKAEAAEFRYKY

SEQ ID NO: 2677 - protein, 8 aa, Artificial
  helical interface sequence
VHWYVGEG

SEQ ID NO: 2678 - protein, 19 aa, Artificial
  helical interface sequence
SKLRGHSITLMYALQNFVD

SEQ ID NO: 2679 - protein, 45 aa, Artificial
  helical interface sequence
ESKDAGIRTLVMLDEQGEQLDRVEEGMNHINQDMKEAEKNLKDLG

SEQ ID NO: 2680 - protein, 22 aa, Artificial
  helical interface sequence
KETLSERLSALQDKIIDHYEND

SEQ ID NO: 2681 - protein, 15 aa, Artificial
  helical interface sequence
SDAIERVIKHYEHEL

SEQ ID NO: 2682 - protein, 13 aa, Artificial
  helical interface sequence
LKERCLQVVRSLV

SEQ ID NO: 2683 - protein, 17 aa, Artificial
  helical interface sequence
TALGVIRSLWKDSLAKT

SEQ ID NO: 2684 - protein, 13 aa, Artificial
  helical interface sequence
ELTLVRHYTGLSR

SEQ ID NO: 2685 - protein, 13 aa, Artificial
  helical interface sequence
LSEFMGDIVALVD

SEQ ID NO: 2686 - protein, 35 aa, Artificial
  helical interface sequence
YHLVDYLTGDFLEEQYKGQRDLAGKASTLKKLMDR

SEQ ID NO: 2687 - protein, 35 aa, Artificial; identical to SEQ ID NO: 2686
  helical interface sequence

SEQ ID NO: 2688 - protein, 35 aa, Artificial; identical to SEQ ID NO: 2686
  helical interface sequence

SEQ ID NO: 2689 - protein, 35 aa, Artificial; identical to SEQ ID NO: 2686
  helical interface sequence

SEQ ID NO: 2690 - protein, 8 aa, Artificial
  helical interface sequence
PAARNILE

SEQ ID NO: 2691 - protein, 12 aa, Artificial
  helical interface sequence
SDIMDFVLKNTP

SEQ ID NO: 2692 - protein, 14 aa, Artificial
  helical interface sequence
LHDLVDYYHFWKED

SEQ ID NO: 2693 - protein, 26 aa, Artificial
  helical interface sequence
LQDIDQAENTARSTAVKLLEELKKHL

SEQ ID NO: 2694 - protein, 11 aa, Artificial
  helical interface sequence
IKNLRRVAKEL

SEQ ID NO: 2695 - protein, 23 aa, Artificial
  helical interface sequence
LMEINTSGTFLTQALNHMYKLRT

SEQ ID NO: 2696 - protein, 54 aa, Artificial
  helical interface sequence
NELRTKAEEEADKLNKEVEDLTASLFDEANNMVADARKEKYAIEILNKRLTEQL

SEQ ID NO: 2697 - protein, 5 aa, Artificial
  helical interface sequence
FWDLY

SEQ ID NO: 2698 - protein, 5 aa, Artificial
  helical interface sequence
FWDLY

SEQ ID NO: 2699 - protein, 5 aa, Artificial
  helical interface sequence
FWDLY

SEQ ID NO: 2700 - protein, 5 aa, Artificial
  helical interface sequence
VLEYF

SEQ ID NO: 2701 - protein, 11 aa, Artificial
  helical interface sequence
LEAIIRKALMG

SEQ ID NO: 2702 - protein, 33 aa, Artificial
  helical interface sequence
LQQQHQRLAQLLLILSHIRHMSNKGMEHLYSMK

SEQ ID NO: 2703 - protein, 14 aa, Artificial
  helical interface sequence
AGLAMGTMDIVKLH

SEQ ID NO: 2704 - protein, 34 aa, Artificial; identical to SEQ ID NO: 2494
  helical interface sequence

SEQ ID NO: 2705 - protein, 28 aa, Artificial
  helical interface sequence
RMANNARERVRVRDINEAFRELGRMCQL

SEQ ID NO: 2706 - protein, 14 aa, Artificial
  helical interface sequence
FLDLCAMLVCKLFS

SEQ ID NO: 2707 - protein, 12 aa, Artificial
  helical interface sequence
RKFISDYLWSLV

SEQ ID NO: 2708 - protein, 12 aa, Artificial
  helical interface sequence
VITEVIASADSQ

SEQ ID NO: 2709 - protein, 25 aa, Artificial
  helical interface sequence
NRRMAACLRDMEIILRYVSYALLAG

SEQ ID NO: 2710 - protein, 15 aa, Artificial
  helical interface sequence
ERQKVHCLNTLFSRL

SEQ ID NO: 2711 - protein, 28 aa, Artificial
  helical interface sequence
GWLIRSIHRWSASMMVLMMILHVFRVYL

SEQ ID NO: 2712 - protein, 25 aa, Artificial
  helical interface sequence
HEDQIALLKGSAVEAMFLRSAEIFN

SEQ ID NO: 2713 - protein, 16 aa, Artificial
  helical interface sequence
WADIINRANLGMEVMH

SEQ ID NO: 2714 - protein, 19 aa, Artificial
  helical interface sequence
FVKEIKKTAELMEKAAAEG

SEQ ID NO: 2715 - protein, 22 aa, Artificial
  helical interface sequence
VGDAQVLVRYMKAELELYRLQR

SEQ ID NO: 2716 - protein, 19 aa, Artificial
  helical interface sequence
PVLSKLCVPVANQFINLAG

SEQ ID NO: 2717 - protein, 8 aa, Artificial
  helical interface sequence
FSDLWKLL

SEQ ID NO: 2718 - protein, 16 aa, Artificial
  helical interface sequence
PEELIALHDANISRYG

SEQ ID NO: 2719 - protein, 8 aa, Artificial
  helical interface sequence
EKELLDSY

SEQ ID NO: 2720 - protein, 14 aa, Artificial
  helical interface sequence
LKDYEDQQKQLEQV

SEQ ID NO: 2721 - protein, 10 aa, Artificial
  helical interface sequence
ERELLESYID

SEQ ID NO: 2722 - protein, 25 aa, Artificial
  helical interface sequence
QEMTATCLRDLDYYLRLITYGIVAG

SEQ ID NO: 2723 - protein, 24 aa, Artificial
  helical interface sequence
FHPYYTIKDILGALLLILALMLLV

SEQ ID NO: 2724 - protein, 8 aa, Artificial
  helical interface sequence
SILESYSG

SEQ ID NO: 2725 - protein, 17 aa, Artificial
  helical interface sequence
LYEEDKVCAYYAGGKLY

SEQ ID NO: 2726 - protein, 22 aa, Artificial
  helical interface sequence
ADYKTAMAGQMVKRALNAAWAR

SEQ ID NO: 2727 - protein, 14 aa, Artificial
  helical interface sequence
TAYQSFEQVVNELF

SEQ ID NO: 2728 - protein, 13 aa, Artificial
  helical interface sequence
IIVFYNSVFMQRL

SEQ ID NO: 2729 - protein, 12 aa, Artificial
  helical interface sequence
KAEMSEYLFDKL

SEQ ID NO: 2730 - protein, 21 aa, Artificial
  helical interface sequence
IQAGATANRVALEAMILARNE

SEQ ID NO: 2731 - protein, 14 aa, Artificial
  helical interface sequence
YKPIIAEAAKMAVG

SEQ ID NO: 2732 - protein, 33 aa, Artificial
  helical interface sequence
PTVCFLKERLQLKHLSLLTTLSNRVCSQYAAYG

SEQ ID NO: 2733 - protein, 16 aa, Artificial
  helical interface sequence
TIGNSLVDALDTLISD

SEQ ID NO: 2734 - protein, 25 aa, Artificial
  helical interface sequence
VPLLNTSVLLASGVSITWAHHSLME

SEQ ID NO: 2735 - protein, 22 aa, Artificial
  helical interface sequence
PRMNNMSFWLLPPSFLLLLASS

SEQ ID NO: 2736 - protein, 26 aa, Artificial
  helical interface sequence
FSKGLIIQFIDQAQTTFAQMQRQLDG

SEQ ID NO: 2737 - protein, 23 aa, Artificial
  helical interface sequence
AGIAIELVRLFAVELEHYEKIEG

SEQ ID NO: 2738 - protein, 6 aa, Artificial
  helical interface sequence
YQNLHT

SEQ ID NO: 2739 - protein, 21 aa, Artificial
  helical interface sequence
FYTKNLLLNEGIRAWMAPQDQ

SEQ ID NO: 2740 - protein, 20 aa, Artificial
  helical interface sequence
SKLRGHSITLMYALQNFVDA

SEQ ID NO: 2741 - protein, 17 aa, Artificial
  helical interface sequence
ARYLFHALQMGSVYIHQ

SEQ ID NO: 2742 - protein, 17 aa, Artificial
  helical interface sequence
EKDKLKMEVDQLKKEVT

SEQ ID NO: 2743 - protein, 22 aa, Artificial
  helical interface sequence
LDQLRQEAEQLKNQIRDARKAC

SEQ ID NO: 2744 - protein, 17 aa, Artificial
  helical interface sequence
AIEQMMAFETAKGFVAG

SEQ ID NO: 2745 - protein, 35 aa, Artificial; identical to SEQ ID NO: 2686
  helical interface sequence

SEQ ID NO: 2746 - protein, 35 aa, Artificial; identical to SEQ ID NO: 2686
  helical interface sequence

SEQ ID NO: 2747 - protein, 35 aa, Artificial; identical to SEQ ID NO: 2686
  helical interface sequence

SEQ ID NO: 2748 - protein, 13 aa, Artificial
  helical interface sequence
FQVEYSLEAIKLG

SEQ ID NO: 2749 - protein, 11 aa, Artificial
  helical interface sequence
FQVEYAVKAVE

SEQ ID NO: 2750 - protein, 19 aa, Artificial
  helical interface sequence
EEDMVTVVEDWMNFYINYY

SEQ ID NO: 2751 - protein, 17 aa, Artificial
  helical interface sequence
QKEIDRLNEVAKNLNES

SEQ ID NO: 2752 - protein, 15 aa, Artificial
  helical interface sequence
DKKLAKLIDEVETLF

SEQ ID NO: 2753 - protein, 20 aa, Artificial
  helical interface sequence
TTEAFEKMVSLLSVLLSMQG

SEQ ID NO: 2754 - protein, 12 aa, Artificial
  helical interface sequence
MWERVKSIIKSS

SEQ ID NO: 2755 - protein, 19 aa, Artificial
  helical interface sequence
PDEVVSLVNQGLQEGERDF

SEQ ID NO: 2756 - protein, 14 aa, Artificial
  helical interface sequence
AEDHRVWKDYVHTL

SEQ ID NO: 2757 - protein, 36 aa, Artificial; identical to SEQ ID NO: 1807
  helical interface sequence

SEQ ID NO: 2758 - protein, 6 aa, Artificial
  helical interface sequence
LCEEAC

SEQ ID NO: 2759 - protein, 17 aa, Artificial
  helical interface sequence
DVVREAQAGMVEFTLLN

SEQ ID NO: 2760 - protein, 14 aa, Artificial
  helical interface sequence
VSAHRKAQKAVNLV

SEQ ID NO: 2761 - protein, 9 aa, Artificial
  helical interface sequence
YEEFVQMMT

SEQ ID NO: 2762 - protein, 23 aa, Artificial
  helical interface sequence
DEFKTTIQHFRHTALQAAINKTV

SEQ ID NO: 2763 - protein, 13 aa, Artificial
  helical interface sequence
AVDTYCRHNYGVG

SEQ ID NO: 2764 - protein, 13 aa, Artificial
  helical interface sequence
AFQLRQLILRGLQ

SEQ ID NO: 2765 - protein, 19 aa, Artificial
  helical interface sequence
LLEEDKICGYVAGGLMYAA

SEQ ID NO: 2766 - protein, 9 aa, Artificial
  helical interface sequence
WNAYIDNLM

SEQ ID NO: 2767 - protein, 43 aa, Artificial; identical to SEQ ID NO: 336
  helical interface sequence

SEQ ID NO: 2768 - protein, 16 aa, Artificial
  helical interface sequence
VDEIGPQALARLLIVS

SEQ ID NO: 2769 - protein, 12 aa, Artificial
  helical interface sequence
PLTDAVSTADSQ

SEQ ID NO: 2770 - protein, 14 aa, Artificial
  helical interface sequence
ADYLRQLCDIWDLR

SEQ ID NO: 2771 - protein, 31 aa, Artificial
  helical interface sequence
PKSKDLIRAKFTEYLNRAEQLKKHLESEEAN

SEQ ID NO: 2772 - protein, 75 aa, Artificial
  helical interface sequence
ADVLRNYQEYSLANIIYYSLKESTTSEQSARMTAMDNASKNASEMIDKLTLTFNRTRQAVITKELIEIISGAAAL

SEQ ID NO: 2773 - protein, 12 aa, Artificial
  helical interface sequence
VITEVIASADSQ

SEQ ID NO: 2774 - protein, 12 aa, Artificial
  helical interface sequence
VITEVIASADSQ

SEQ ID NO: 2775 - protein, 23 aa, Artificial
  helical interface sequence
WGRIVTIFAFGGVLLKKLKQEQI

SEQ ID NO: 2776 - protein, 12 aa, Artificial
  helical interface sequence
KAAVFEEIDTYE

SEQ ID NO: 2777 - protein, 20 aa, Artificial
  helical interface sequence
KVTAMKCFLLELQVISLESG

SEQ ID NO: 2778 - protein, 11 aa, Artificial
  helical interface sequence
YQVEYAFKATN

SEQ ID NO: 2779 - protein, 35 aa, Artificial
  helical interface sequence
ANRVGWLIAFVALVMLAQVMLVLKKKQVEKVQAAE

SEQ ID NO: 2780 - protein, 21 aa, Artificial
  helical interface sequence
SLYNMGKHALVGLTQSAALEL

SEQ ID NO: 2781 - protein, 60 aa, Artificial
  helical interface sequence
LQRCLEENQELRDAIRQSNQILRERCEELLHFQASQREEKEFLMCKFQEARKLVERLGLE

SEQ ID NO: 2782 - protein, 17 aa, Artificial
  helical interface sequence
VEEFFHLQHYLDTATAP

SEQ ID NO: 2783 - protein, 13 aa, Artificial
  helical interface sequence
AITAVINASDVQG

SEQ ID NO: 2784 - protein, 11 aa, Artificial
  helical interface sequence
FKEQIYDVYRY

SEQ ID NO: 2785 - protein, 12 aa, Artificial
  helical interface sequence
IEPAQEEHEKYH

SEQ ID NO: 2786 - protein, 20 aa, Artificial
  helical interface sequence
PLQLTSQIEHSIRAHISLYY

SEQ ID NO: 2787 - protein, 12 aa, Artificial
  helical interface sequence
PMNLWYKQYRNA

SEQ ID NO: 2788 - protein, 11 aa, Artificial
  helical interface sequence
DEFIAHRLGLI

SEQ ID NO: 2789 - protein, 19 aa, Artificial
  helical interface sequence
YLKAQKVRRLITNDFLKAF

SEQ ID NO: 2790 - protein, 24 aa, Artificial
  helical interface sequence
YQGWQTQWNQALEDLVRAYQSMSG

SEQ ID NO: 2791 - protein, 16 aa, Artificial
  helical interface sequence
YYERYVIGVATLMVEK

SEQ ID NO: 2792 - protein, 13 aa, Artificial
  helical interface sequence
LFQFGDMILQKTG

SEQ ID NO: 2793 - protein, 32 aa, Artificial
  helical interface sequence
EHEKHIFISNLKYQTLLDSIQGRSPNVALLPL

SEQ ID NO: 2794 - protein, 22 aa, Artificial
  helical interface sequence
KDILEQARAAVDTYCRHNYGVV

SEQ ID NO: 2795 - protein, 17 aa, Artificial
  helical interface sequence
TDVAQDMLNIQKAKLTG

SEQ ID NO: 2796 - protein, 15 aa, Artificial
  helical interface sequence
KLKFDKLYKMLTEIY

SEQ ID NO: 2797 - protein, 25 aa, Artificial
  helical interface sequence
SRRMAACLRDMEIVLRYVSYAMIAG

SEQ ID NO: 2798 - protein, 18 aa, Artificial
  helical interface sequence
PSYIFEYLATVMYQRRSK

SEQ ID NO: 2799 - protein, 8 aa, Artificial
  helical interface sequence
KVASHINE

SEQ ID NO: 2800 - protein, 31 aa, Artificial; identical to SEQ ID NO: 930
  helical interface sequence

SEQ ID NO: 2801 - protein, 27 aa, Artificial
  helical interface sequence
STEIQVAFGRFRQAKAGLEAAKALTSK

SEQ ID NO: 2802 - protein, 27 aa, Artificial
  helical interface sequence
STEIQVAFGRFRQAKAGLEAAKALTSK

SEQ ID NO: 2803 - protein, 27 aa, Artificial
  helical interface sequence
STEIQVAFGRFRQAKAGLEAAKALTSK

SEQ ID NO: 2804 - protein, 13 aa, Artificial
  helical interface sequence
AFTKVVSQADTRG

SEQ ID NO: 2805 - protein, 6 aa, Artificial
  helical interface sequence
NTIFDQ

SEQ ID NO: 2806 - protein, 25 aa, Artificial
  helical interface sequence
SSAVVFKQMVLQQALPMTLKGLDKA

SEQ ID NO: 2807 - protein, 32 aa, Artificial
  helical interface sequence
NEERNLLSVAYKNVVGARRSSWRVVSSIEQKT

SEQ ID NO: 2808 - protein, 16 aa, Artificial
  helical interface sequence
KLPFQRLVREIAQDFK

SEQ ID NO: 2809 - protein, 14 aa, Artificial
  helical interface sequence
AKNYGRAVYECLRG

SEQ ID NO: 2810 - protein, 14 aa, Artificial
  helical interface sequence
PELIEFVNQAVYGG

SEQ ID NO: 2811 - protein, 16 aa, Artificial
  helical interface sequence
VKFLAITTDCLQILAY

SEQ ID NO: 2812 - protein, 15 aa, Artificial
  helical interface sequence
HEDIHTYLREMEVKC

SEQ ID NO: 2813 - protein, 27 aa, Artificial
  helical interface sequence
TCGIADFLNNYQTSVDKDLRTLEGILY

SEQ ID NO: 2814 - protein, 36 aa, Artificial; identical to SEQ ID NO: 581
  helical interface sequence

SEQ ID NO: 2815 - protein, 14 aa, Artificial
  helical interface sequence
DPQKKAFIFSLWDD

SEQ ID NO: 2816 - protein, 43 aa, Artificial; identical to SEQ ID NO: 26
  helical interface sequence

SEQ ID NO: 2817 - protein, 9 aa, Artificial
  helical interface sequence
LEELRKQRG

SEQ ID NO: 2818 - protein, 13 aa, Artificial
  helical interface sequence
KEYWRYIGRSLQS

SEQ ID NO: 2819 - protein, 32 aa, Artificial
  helical interface sequence
PTNLRVLRSILENLRSKIQKLESDVSAQMEYC

SEQ ID NO: 2820 - protein, 20 aa, Artificial
  helical interface sequence
DSEVQLEMITAWKKFVEEKK

SEQ ID NO: 2821 - protein, 9 aa, Artificial
  helical interface sequence
AIDALSSDF

SEQ ID NO: 2822 - protein, 12 aa, Artificial
  helical interface sequence
EDVIMGAFKVLD

SEQ ID NO: 2823 - protein, 16 aa, Artificial
  helical interface sequence
ISEQAAKIIQIINEFK

SEQ ID NO: 2824 - protein, 25 aa, Artificial
  helical interface sequence
VPLLNTSVLLASGVSITWAHHSLME

SEQ ID NO: 2825 - protein, 12 aa, Artificial
  helical interface sequence
STDVLLLSRYLL

SEQ ID NO: 2826 - protein, 21 aa, Artificial
  helical interface sequence
ASTNAVIAAVCATEVFKIATS

SEQ ID NO: 2827 - protein, 6 aa, Artificial
  helical interface sequence
PSKFTE

SEQ ID NO: 2828 - protein, 13 aa, Artificial
  helical interface sequence
EREKLVIQLIFYE

SEQ ID NO: 2829 - protein, 53 aa, Artificial; identical to SEQ ID NO: 171
  helical interface sequence

SEQ ID NO: 2830 - protein, 22 aa, Artificial
  helical interface sequence
AADTEAVTQLIGSNIELHSLYT

SEQ ID NO: 2831 - protein, 15 aa, Artificial
  helical interface sequence
INSAARNIQHLLYGK

SEQ ID NO: 2832 - protein, 22 aa, Artificial
  helical interface sequence
PLAVEGQTQGGVWMGMGQALSE

SEQ ID NO: 2833 - protein, 65 aa, Artificial; identical to SEQ ID NO: 381
  helical interface sequence

SEQ ID NO: 2834 - protein, 20 aa, Artificial
  helical interface sequence
TIKDILGALLLILALMLLVL

SEQ ID NO: 2835 - protein, 31 aa, Artificial; identical to SEQ ID NO: 1463
  helical interface sequence

SEQ ID NO: 2836 - protein, 14 aa, Artificial
  helical interface sequence
EEWVAKQTKRMLDM

SEQ ID NO: 2837 - protein, 15 aa, Artificial
  helical interface sequence
QGELPQCFCRMCAVF

SEQ ID NO: 2838 - protein, 9 aa, Artificial
  helical interface sequence
AYSYIREAW

SEQ ID NO: 2839 - protein, 14 aa, Artificial
  helical interface sequence
ELVELEIRELLTEF

SEQ ID NO: 2840 - protein, 33 aa, Artificial
  helical interface sequence
FEEFLVMMVRQMKEDAKGKSEEELANCFRIFDK

SEQ ID NO: 2841 - protein, 13 aa, Artificial
  helical interface sequence
FQVEYSLEAIKLG

SEQ ID NO: 2842 - protein, 8 aa, Artificial
  helical interface sequence
IEEREKLD

SEQ ID NO: 2843 - protein, 12 aa, Artificial
  helical interface sequence
AFETSKFFTDLR

SEQ ID NO: 2844 - protein, 12 aa, Artificial
  helical interface sequence
EESWDDYLYWQE

SEQ ID NO: 2845 - protein, 13 aa, Artificial
  helical interface sequence
RLPALRSIGLKCL

SEQ ID NO: 2846 - protein, 7 aa, Artificial
  helical interface sequence
VGCGQYS

SEQ ID NO: 2847 - protein, 21 aa, Artificial
  helical interface sequence
RTSLYLGLLLILVLALLFSSY

SEQ ID NO: 2848 - protein, 35 aa, Artificial; identical to SEQ ID NO: 716
  helical interface sequence

SEQ ID NO: 2849 - protein, 29 aa, Artificial
  helical interface sequence
PDEFRQAFDLAVKGINIIYNLEREALKSK

SEQ ID NO: 2850 - protein, 12 aa, Artificial
  helical interface sequence
PITEAIASADSQ

SEQ ID NO: 2851 - protein, 15 aa, Artificial
  helical interface sequence
TNIQKEATWTMSNIT

SEQ ID NO: 2852 - protein, 19 aa, Artificial
  helical interface sequence
PEFLAQVSRVVSGADIAIN

SEQ ID NO: 2853 - protein, 37 aa, Artificial
  helical interface sequence
PNRVKWMIAFICLVMLAQLMLILKKKQVEKVQAAEMN

SEQ ID NO: 2854 - protein, 18 aa, Artificial
  helical interface sequence
EAAYFFTNILSAESFISN

SEQ ID NO: 2855 - protein, 17 aa, Artificial
  helical interface sequence
PRDLISNINVIVLELKG

SEQ ID NO: 2856 - protein, 6 aa, Artificial
  helical interface sequence
FEKTME

SEQ ID NO: 2857 - protein, 28 aa, Artificial
  helical interface sequence
ISTELSKVNASLQNTVKYIKESNHQLQS

SEQ ID NO: 2858 - protein, 32 aa, Artificial
  helical interface sequence
GGIDISTELSKVNASLQNTVKYIKESNHQLQS

SEQ ID NO: 2859 - protein, 33 aa, Artificial
  helical interface sequence
RDELMEAIQKQEEINFRLQDYIDRIIVAIMETN

SEQ ID NO: 2860 - protein, 11 aa, Artificial
  helical interface sequence
YAGFVDLTTEC

SEQ ID NO: 2861 - protein, 8 aa, Artificial
  helical interface sequence
WLPFARAA

SEQ ID NO: 2862 - protein, 22 aa, Artificial
  helical interface sequence
PQESRRLSIQRCIQSLVHACQC

SEQ ID NO: 2863 - protein, 14 aa, Artificial
  helical interface sequence
TLDMLTVKVKLDEA

SEQ ID NO: 2864 - protein, 8 aa, Artificial
  helical interface sequence
VVENIIIG

SEQ ID NO: 2865 - protein, 11 aa, Artificial
  helical interface sequence
AAEVEFLAEKE

SEQ ID NO: 2866 - protein, 31 aa, Artificial
  helical interface sequence
PTTARTMLIIVNTWLGYPYMMILCMGLLKAI

SEQ ID NO: 2867 - protein, 27 aa, Artificial
  helical interface sequence
STEIQVAFGRFRQAAAGLSAATALTSA

SEQ ID NO: 2868 - protein, 9 aa, Artificial
  helical interface sequence
ENLLRGVFG

SEQ ID NO: 2869 - protein, 9 aa, Artificial
  helical interface sequence
PEEVEEVIG

SEQ ID NO: 2870 - protein, 7 aa, Artificial
  helical interface sequence
TFSFCLE

SEQ ID NO: 2871 - protein, 68 aa, Artificial; identical to SEQ ID NO: 817
  helical interface sequence

SEQ ID NO: 2872 - protein, 24 aa, Artificial
  helical interface sequence
IEFRRTLTLSFFFKFYLTVLKKLG

SEQ ID NO: 2873 - protein, 25 aa, Artificial
  helical interface sequence
RSILENLRSKIQKLESDVSAQMEYC

SEQ ID NO: 2874 - protein, 7 aa, Artificial
  helical interface sequence
WELSYRL

SEQ ID NO: 2875 - protein, 19 aa, Artificial
  helical interface sequence
ELAKHAVSEGTKAVTKYTS

SEQ ID NO: 2876 - protein, 5 aa, Artificial
  helical interface sequence
RLFDK

SEQ ID NO: 2877 - protein, 9 aa, Artificial
  helical interface sequence
LDALWDCLT

SEQ ID NO: 2878 - protein, 17 aa, Artificial
  helical interface sequence
VALNHHINQALKAHVAM

SEQ ID NO: 2879 - protein, 11 aa, Artificial
  helical interface sequence
EAELQDMINEV

SEQ ID NO: 2880 - protein, 22 aa, Artificial
  helical interface sequence
SVGTSVASAEQDELSQRLARLR

SEQ ID NO: 2881 - protein, 63 aa, Artificial
  helical interface sequence
SSANNRDNTYNRVSEDLRSRIEVLKRKVIEKVQHIQLLQKNVRAQLVDMKRLEVDIDIKIRSC

SEQ ID NO: 2882 - protein, 11 aa, Artificial
  helical interface sequence
LDQVLNMLYWV

SEQ ID NO: 2883 - protein, 15 aa, Artificial
  helical interface sequence
PEVKRRIMLGTFALS

SEQ ID NO: 2884 - protein, 15 aa, Artificial
  helical interface sequence
PEVKRRIMLGTFALS

SEQ ID NO: 2885 - protein, 20 aa, Artificial
  helical interface sequence
WRDRFLFCAEALYKAQAETG

SEQ ID NO: 2886 - protein, 11 aa, Artificial
  helical interface sequence
TRKLTRLLREK

SEQ ID NO: 2887 - protein, 32 aa, Artificial; identical to SEQ ID NO: 315
  helical interface sequence

SEQ ID NO: 2888 - protein, 8 aa, Artificial
  helical interface sequence
QMQHWKEQ

SEQ ID NO: 2889 - protein, 8 aa, Artificial
  helical interface sequence
SILESYSG

SEQ ID NO: 2890 - protein, 24 aa, Artificial
  helical interface sequence
AIGKAKCARDIGYYLRMVTYCLVV

SEQ ID NO: 2891 - protein, 12 aa, Artificial
  helical interface sequence
AEKVFKQYANDN

SEQ ID NO: 2892 - protein, 11 aa, Artificial
  helical interface sequence
RYIAADAVEAV

SEQ ID NO: 2893 - protein, 24 aa, Artificial
  helical interface sequence
KGFEKIGNDIQILKSSINIAIEKL

SEQ ID NO: 2894 - protein, 31 aa, Artificial; identical to SEQ ID NO: 930
  helical interface sequence

SEQ ID NO: 2895 - protein, 16 aa, Artificial
  helical interface sequence
IAQARKLVEQLKMEAN

SEQ ID NO: 2896 - protein, 25 aa, Artificial
  helical interface sequence
QRGKDKCARDIGYYLRMVTYCLIAG

SEQ ID NO: 2897 - protein, 16 aa, Artificial
  helical interface sequence
QGCVAYFRTYFNRHFK

SEQ ID NO: 2898 - protein, 29 aa, Artificial
  helical interface sequence
PETNLIATAHYLEALRLQVKAARAMAVFG

SEQ ID NO: 2899 - protein, 14 aa, Artificial
  helical interface sequence
DEQIAAQVDYIVAN

SEQ ID NO: 2900 - protein, 14 aa, Artificial
  helical interface sequence
AKNYGRAVYECLRG

SEQ ID NO: 2901 - protein, 18 aa, Artificial
  helical interface sequence
QLGVAGVFGGALFCAMHG

SEQ ID NO: 2902 - protein, 15 aa, Artificial
  helical interface sequence
RNFRLLEELEEGQKG

SEQ ID NO: 2903 - protein, 9 aa, Artificial
  helical interface sequence
KDLLEQKRA

SEQ ID NO: 2904 - protein, 14 aa, Artificial
  helical interface sequence
PEQVGKMKAIVEKL

SEQ ID NO: 2905 - protein, 27 aa, Artificial
  helical interface sequence
LHELMRAWELVHRVWTAEAHVRHMLFR

SEQ ID NO: 2906 - protein, 7 aa, Artificial
  helical interface sequence
ERELLES

SEQ ID NO: 2907 - protein, 23 aa, Artificial
  helical interface sequence
SVLEHLRAKMQRMEEAIKTQKEL

SEQ ID NO: 2908 - protein, 18 aa, Artificial
  helical interface sequence
AEVAETKVAMVNKYAREN

SEQ ID NO: 2909 - protein, 26 aa, Artificial
  helical interface sequence
HHPYVKDKSEEARYTQRFLAAYSSEG

SEQ ID NO: 2910 - protein, 30 aa, Artificial
  helical interface sequence
VALFREVYHGAITATSYAEILLNQAIRTYG

SEQ ID NO: 2911 - protein, 29 aa, Artificial
  helical interface sequence
PQVAARKILDALEYRTWKLGVHKEVAERY

SEQ ID NO: 2912 - protein, 16 aa, Artificial
  helical interface sequence
AKEYARMEAVKDERQF

SEQ ID NO: 2913 - protein, 26 aa, Artificial
  helical interface sequence
PTWRTSSCNRYWGAFLFNEYGLFNAH

SEQ ID NO: 2914 - protein, 6 aa, Artificial
  helical interface sequence
RIRGLL

SEQ ID NO: 2915 - protein, 16 aa, Artificial
  helical interface sequence
TLGNSLQESLDELIQS

SEQ ID NO: 2916 - protein, 18 aa, Artificial
  helical interface sequence
AEVAETKVAMVNKYAREN

SEQ ID NO: 2917 - protein, 12 aa, Artificial
  helical interface sequence
FQVEYAVKAVEN

SEQ ID NO: 2918 - protein, 7 aa, Artificial
  helical interface sequence
EWWRSGN

SEQ ID NO: 2919 - protein, 22 aa, Artificial
  helical interface sequence
KETLSERLSALQDKIIDHYEND

SEQ ID NO: 2920 - protein, 32 aa, Artificial; identical to SEQ ID NO: 1080
  helical interface sequence

SEQ ID NO: 2921 - protein, 15 aa, Artificial
  helical interface sequence
QGELPQCFCRMCAVF

SEQ ID NO: 2922 - protein, 6 aa, Artificial
  helical interface sequence
FAALAG

SEQ ID NO: 2923 - protein, 16 aa, Artificial
  helical interface sequence
TEHTVHWLIDAMSEFS

SEQ ID NO: 2924 - protein, 15 aa, Artificial
  helical interface sequence
HEDIHTYLREMEVKC

SEQ ID NO: 2925 - protein, 14 aa, Artificial
  helical interface sequence
QLELEEAFRLYELN

SEQ ID NO: 2926 - protein, 18 aa, Artificial
  helical interface sequence
QLERNIETIINTFHQYSV

SEQ ID NO: 2927 - protein, 18 aa, Artificial
  helical interface sequence
QLERNIETIINTFHQYSV

SEQ ID NO: 2928 - protein, 20 aa, Artificial
  helical interface sequence
FQEFLILVIKMGVAAHKKSH

SEQ ID NO: 2929 - protein, 18 aa, Artificial
  helical interface sequence
QLERNIETIINTFHQYSV

SEQ ID NO: 2930 - protein, 29 aa, Artificial
  helical interface sequence
RFAKLLLRLPALRSIGLKCLEHLFFFKLI

SEQ ID NO: 2931 - protein, 20 aa, Artificial
  helical interface sequence
PEFKAHIARVLGGLDRVISM

SEQ ID NO: 2932 - protein, 17 aa, Artificial
  helical interface sequence
QKEIDRLNEVAKNLNES

SEQ ID NO: 2933 - protein, 16 aa, Artificial
  helical interface sequence
QKEIDRLNEVAKNLNE

SEQ ID NO: 2934 - protein, 21 aa, Artificial
  helical interface sequence
EQQKEFQATARKFAREEIIPV

SEQ ID NO: 2935 - protein, 21 aa, Artificial
  helical interface sequence
ETITYVFIFACIIALFFFAIF

SEQ ID NO: 2936 - protein, 21 aa, Artificial
  helical interface sequence
ETITYVFIFACIIALFFFAIF

SEQ ID NO: 2937 - protein, 29 aa, Artificial
  helical interface sequence
PEYWDGETRKVKAHSQTHRVDLGTLRGYY

SEQ ID NO: 2938 - protein, 7 aa, Artificial
  helical interface sequence
TFISTIG

SEQ ID NO: 2939 - protein, 11 aa, Artificial
  helical interface sequence
DEAFSRLAQSR

SEQ ID NO: 2940 - protein, 19 aa, Artificial
  helical interface sequence
FQEFMAFVAMVTTACHEFF

SEQ ID NO: 2941 - protein, 9 aa, Artificial
  helical interface sequence
EDYDRLRPL

SEQ ID NO: 2942 - protein, 12 aa, Artificial
  helical interface sequence
EEEIREAFRVFD

SEQ ID NO: 2943 - protein, 13 aa, Artificial
  helical interface sequence
IRSLIHHIGLALG

SEQ ID NO: 2944 - protein, 15 aa, Artificial
  helical interface sequence
KRELQVLYRGFKNEC

SEQ ID NO: 2945 - protein, 5 aa, Artificial
  helical interface sequence
PFLAL

SEQ ID NO: 2946 - protein, 69 aa, Artificial
  helical interface sequence
NYQEYSLANIIYYSLKESTTSEQSARMTAMDNASKNASEMIDKLTLTFNRTRQAVITKELIEIISGAAA

SEQ ID NO: 2947 - protein, 29 aa, Artificial
  helical interface sequence
GLIYEETRGVLKVFLENVIRDAVTYTEHA

SEQ ID NO: 2948 - protein, 27 aa, Artificial
  helical interface sequence
IYEETRGVLKVFLENVIRDAVTYTEHA

SEQ ID NO: 2949 - protein, 21 aa, Artificial
  helical interface sequence
DDHVQFLIYQILRGLKYIHSA

SEQ ID NO: 2950 - protein, 14 aa, Artificial
  helical interface sequence
LNVLLAEIALIGTG

SEQ ID NO: 2951 - protein, 16 aa, Artificial
  helical interface sequence
SLRQVLANAERSYNQL

SEQ ID NO: 2952 - protein, 7 aa, Artificial
  helical interface sequence
EIIAKTL

SEQ ID NO: 2953 - protein, 17 aa, Artificial
  helical interface sequence
TEQQKAYEQVQRDLSQL

SEQ ID NO: 2954 - protein, 30 aa, Artificial
  helical interface sequence
RMANNARERVRVRDINEAFRELGRMCQLHL

SEQ ID NO: 2955 - protein, 7 aa, Artificial
  helical interface sequence
DRLRPLS

SEQ ID NO: 2956 - protein, 15 aa, Artificial
  helical interface sequence
FFIAKGVVDRVAEKL

SEQ ID NO: 2957 - protein, 25 aa, Artificial
  helical interface sequence
QRGKDKCARDIGYYLRMVTYCLIAG

SEQ ID NO: 2958 - protein, 12 aa, Artificial
  helical interface sequence
PLTDAVSTADSQ

SEQ ID NO: 2959 - protein, 12 aa, Artificial
  helical interface sequence
DDLQARLNTLKK

SEQ ID NO: 2960 - protein, 35 aa, Artificial; identical to SEQ ID NO: 1457
  helical interface sequence

SEQ ID NO: 2961 - protein, 11 aa, Artificial
  helical interface sequence
QRCCNLFEKFF

SEQ ID NO: 2962 - protein, 20 aa, Artificial
  helical interface sequence
PEHVIGVTVAFVIIEAILTY

SEQ ID NO: 2963 - protein, 14 aa, Artificial
  helical interface sequence
KFYINQVLSAAKNF

SEQ ID NO: 2964 - protein, 24 aa, Artificial
  helical interface sequence
TIVPIVILVAIGAFSLPVLFNQQE

SEQ ID NO: 2965 - protein, 24 aa, Artificial
  helical interface sequence
KHKLVDFIIEFMEEVDAEISEMKL

SEQ ID NO: 2966 - protein, 20 aa, Artificial
  helical interface sequence
WKDKAAVEINLAVLHSFQLA

SEQ ID NO: 2967 - protein, 24 aa, Artificial
  helical interface sequence
DEGLAIHLHAELIMSRVHDELFAP

SEQ ID NO: 2968 - protein, 9 aa, Artificial
  helical interface sequence
EHDFQMLFA

SEQ ID NO: 2969 - protein, 22 aa, Artificial
  helical interface sequence
AAAIATLIFLLVGALAIVNLKA

SEQ ID NO: 2970 - protein, 17 aa, Artificial
  helical interface sequence
LVQRKDELLQQARKRFL

SEQ ID NO: 2971 - protein, 11 aa, Artificial
  helical interface sequence
SMEELSQALAS

SEQ ID NO: 2972 - protein, 40 aa, Artificial; identical to SEQ ID NO: 1389
  helical interface sequence

SEQ ID NO: 2973 - protein, 10 aa, Artificial
  helical interface sequence
RSERKKWIHC

SEQ ID NO: 2974 - protein, 22 aa, Artificial
  helical interface sequence
AQGALANIAVDKANLEIMTKRS

SEQ ID NO: 2975 - protein, 32 aa, Artificial; identical to SEQ ID NO: 990
  helical interface sequence

SEQ ID NO: 2976 - protein, 11 aa, Artificial
  helical interface sequence
TRKLTRLLREK

SEQ ID NO: 2977 - protein, 9 aa, Artificial
  helical interface sequence
VNWVQQTLA

SEQ ID NO: 2978 - protein, 16 aa, Artificial
  helical interface sequence
AEAWGADALARLFELH

SEQ ID NO: 2979 - protein, 16 aa, Artificial
  helical interface sequence
YSSWHYRSCLLPQLHP

SEQ ID NO: 2980 - protein, 11 aa, Artificial
  helical interface sequence
TIDEIIEAIEK

SEQ ID NO: 2981 - protein, 9 aa, Artificial
  helical interface sequence
QMQHWKEQR

SEQ ID NO: 2982 - protein, 29 aa, Artificial
  helical interface sequence
PEYWEQQTRIAKEWEQIYRVDLRTLRGYY

SEQ ID NO: 2983 - protein, 10 aa, Artificial
  helical interface sequence
TKQRIDEFES

SEQ ID NO: 2984 - protein, 29 aa, Artificial
  helical interface sequence
PAHMLAISFFFTNCLALSMHGSLILSVTN

SEQ ID NO: 2985 - protein, 16 aa, Artificial
  helical interface sequence
KLPFQRLVREIAQDFK

SEQ ID NO: 2986 - protein, 14 aa, Artificial
  helical interface sequence
KLPFQRLVREIAQD

SEQ ID NO: 2987 - protein, 25 aa, Artificial
  helical interface sequence
QRGKDKCARDIGYYLRMVTYCLIAG

SEQ ID NO: 2988 - protein, 18 aa, Artificial
  helical interface sequence
GLQNCATHTQPFWGSLTN

SEQ ID NO: 2989 - protein, 11 aa, Artificial
  helical interface sequence
KPAIRRLARRG

SEQ ID NO: 2990 - protein, 12 aa, Artificial
  helical interface sequence
DEAREKVVREVL

SEQ ID NO: 2991 - protein, 20 aa, Artificial
  helical interface sequence
WRDRFLFVAEAIYKAQAETG

SEQ ID NO: 2992 - protein, 20 aa, Artificial
  helical interface sequence
WRDRFLFVAEAIYKAQAETG

SEQ ID NO: 2993 - protein, 22 aa, Artificial
  helical interface sequence
AADCSFWERLLARQCRIYELRN

SEQ ID NO: 2994 - protein, 5 aa, Artificial
  helical interface sequence
WNKIL

SEQ ID NO: 2995 - protein, 22 aa, Artificial
  helical interface sequence
PQGGLQNIAVVKHNLGVLTKRS

SEQ ID NO: 2996 - protein, 56 aa, Artificial; identical to SEQ ID NO: 970
  helical interface sequence

SEQ ID NO: 2997 - protein, 30 aa, Artificial; identical to SEQ ID NO: 702
  helical interface sequence

SEQ ID NO: 2998 - protein, 18 aa, Artificial
  helical interface sequence
QDESGAAAIFTVQLDDYL

SEQ ID NO: 2999 - protein, 7 aa, Artificial
  helical interface sequence
PQIRYMG

SEQ ID NO: 3000 - protein, 14 aa, Artificial
  helical interface sequence
AGAINELCWGLEEQ

SEQ ID NO: 3001 - protein, 15 aa, Artificial
  helical interface sequence
ISEQAAKIIQIINEF

SEQ ID NO: 3002 - protein, 29 aa, Artificial
  helical interface sequence
PQVAARKILDALEYRTWKLGVHKEVAERY

SEQ ID NO: 3003 - protein, 30 aa, Artificial; identical to SEQ ID NO: 2910
  helical interface sequence

SEQ ID NO: 3004 - protein, 29 aa, Artificial
  helical interface sequence
QSFLLKCLEQVRKIQGDGAALQEKLCATY

SEQ ID NO: 3005 - protein, 19 aa, Artificial
  helical interface sequence
ADSVFVLSYSIIMLNTDSH

SEQ ID NO: 3006 - protein, 21 aa, Artificial
  helical interface sequence
EKRIKELELLLMSTENELKGQ

SEQ ID NO: 3007 - protein, 31 aa, Artificial; identical to SEQ ID NO: 1463
  helical interface sequence

SEQ ID NO: 3008 - protein, 24 aa, Artificial
  helical interface sequence
LQQELRYIEALSAIVETGQKMLEA

SEQ ID NO: 3009 - protein, 24 aa, Artificial
  helical interface sequence
LQQELRYIEALSAIVETGQKMLEA

SEQ ID NO: 3010 - protein, 13 aa, Artificial
  helical interface sequence
PKNVYYGVAPVAQ

SEQ ID NO: 3011 - protein, 16 aa, Artificial
  helical interface sequence
KDKLKMEVDQLKKEVT

SEQ ID NO: 3012 - protein, 23 aa, Artificial
  helical interface sequence
LDQLRQEAEQLKNQIRDARKACA

SEQ ID NO: 3013 - protein, 32 aa, Artificial
  helical interface sequence
CASLTNKLSQHDLADFKKYIKRKFTLMTLLSI

SEQ ID NO: 3014 - protein, 11 aa, Artificial
  helical interface sequence
IGYEIGSKLAA

SEQ ID NO: 3015 - protein, 17 aa, Artificial
  helical interface sequence
VFEQDDGENWVEIQQVL

SEQ ID NO: 3016 - protein, 32 aa, Artificial; identical to SEQ ID NO: 1080
  helical interface sequence

SEQ ID NO: 3017 - protein, 22 aa, Artificial
  helical interface sequence
GNAVLASGATFCVAVWVYMATQ

SEQ ID NO: 3018 - protein, 28 aa, Artificial
  helical interface sequence
GWLIRSIHRWSASMMVLMMILHVFRVYL

SEQ ID NO: 3019 - protein, 24 aa, Artificial
  helical interface sequence
LEDQVILLRAGWNELLIAGFSHRS

SEQ ID NO: 3020 - protein, 18 aa, Artificial
  helical interface sequence
QLERNIETIINTFHQYSV

SEQ ID NO: 3021 - protein, 13 aa, Artificial
  helical interface sequence
LSEFMGDIVALVD

SEQ ID NO: 3022 - protein, 9 aa, Artificial
  helical interface sequence
YSHPRLFWL

SEQ ID NO: 3023 - protein, 26 aa, Artificial
  helical interface sequence
VATELQAYAKLHLERSYDYLLSAAYF

SEQ ID NO: 3024 - protein, 26 aa, Artificial
  helical interface sequence
VATELQAYAKLHLERSYDYLLSAAYF

SEQ ID NO: 3025 - protein, 26 aa, Artificial
  helical interface sequence
VATELQAYAKLHLERSYDYLLSAAYF

SEQ ID NO: 3026 - protein, 26 aa, Artificial
  helical interface sequence
VATELQAYAKLHLERSYDYLLSAAYF

SEQ ID NO: 3027 - protein, 26 aa, Artificial
  helical interface sequence
VATELQAYAKLHLERSYDYLLSAAYF

SEQ ID NO: 3028 - protein, 26 aa, Artificial
  helical interface sequence
VATELQAYAKLHLERSYDYLLSAAYF

SEQ ID NO: 3029 - protein, 26 aa, Artificial
  helical interface sequence
VATELQAYAKLHLERSYDYLLSAAYF

SEQ ID NO: 3030 - protein, 26 aa, Artificial
  helical interface sequence
VATELQAYAKLHLERSYDYLLSAAYF

SEQ ID NO: 3031 - protein, 26 aa, Artificial
  helical interface sequence
VATELQAYAKLHLERSYDYLLSAAYF

SEQ ID NO: 3032 - protein, 18 aa, Artificial
  helical interface sequence
PEDLFETISQALLNAADR

SEQ ID NO: 3033 - protein, 21 aa, Artificial
  helical interface sequence
RTSLYLGLLLILVLALLFSSY

SEQ ID NO: 3034 - protein, 18 aa, Artificial
  helical interface sequence
MDDLLIRRLTDRNDKEAH

SEQ ID NO: 3035 - protein, 52 aa, Artificial; identical to SEQ ID NO: 499
  helical interface sequence

SEQ ID NO: 3036 - protein, 10 aa, Artificial
  helical interface sequence
VIYHFKHYTE

SEQ ID NO: 3037 - protein, 11 aa, Artificial
  helical interface sequence
FGELKQRVERL

SEQ ID NO: 3038 - protein, 15 aa, Artificial
  helical interface sequence
KRELQVLYRGFKNEC

SEQ ID NO: 3039 - protein, 13 aa, Artificial
  helical interface sequence
AVDTYCRHNYGVG

SEQ ID NO: 3040 - protein, 14 aa, Artificial
  helical interface sequence
PRKMAKAMVLAVTY

SEQ ID NO: 3041 - protein, 10 aa, Artificial
  helical interface sequence
LSQISSTFYF

SEQ ID NO: 3042 - protein, 26 aa, Artificial
  helical interface sequence
TLGIHRLGLLLSLSAVFFSALCMIIT

SEQ ID NO: 3043 - protein, 12 aa, Artificial
  helical interface sequence
FYKVYTVVDEMF

SEQ ID NO: 3044 - protein, 26 aa, Artificial
  helical interface sequence
AKQYQVWQRESKALESAIAIIHYVAG

SEQ ID NO: 3045 - protein, 33 aa, Artificial
  helical interface sequence
GPVLQTLQDEYVARQKRSEAQQEELSDILDALG

SEQ ID NO: 3046 - protein, 19 aa, Artificial
  helical interface sequence
EDENILRNAVNLQVLKFHY

SEQ ID NO: 3047 - protein, 16 aa, Artificial
  helical interface sequence
TGRLFFEFYRLLHDAR

SEQ ID NO: 3048 - protein, 16 aa, Artificial
  helical interface sequence
TDEVLQFLESFIDEKE

SEQ ID NO: 3049 - protein, 25 aa, Artificial
  helical interface sequence
QRGKDKCARDIGYYLRMVTYCLIAG

SEQ ID NO: 3050 - protein, 28 aa, Artificial
  helical interface sequence
AWAMWTRAWTAEENRHGDLLNKYLYLSG

SEQ ID NO: 3051 - protein, 9 aa, Artificial
  helical interface sequence
VRILSKNTG

SEQ ID NO: 3052 - protein, 14 aa, Artificial
  helical interface sequence
YIRYSQICAKAVRD

SEQ ID NO: 3053 - protein, 9 aa, Artificial
  helical interface sequence
ADLYKDRLG

SEQ ID NO: 3054 - protein, 12 aa, Artificial
  helical interface sequence
VVTTVLAAADAA

SEQ ID NO: 3055 - protein, 21 aa, Artificial
  helical interface sequence
KEKKKIAIERIDTLFTLAERV

SEQ ID NO: 3056 - protein, 5 aa, Artificial
  helical interface sequence
ELAKA

SEQ ID NO: 3057 - protein, 9 aa, Artificial
  helical interface sequence
PIDALSEDL

SEQ ID NO: 3058 - protein, 24 aa, Artificial
  helical interface sequence
RTSLYLGLLLILVLALLFSSYFFN

SEQ ID NO: 3059 - protein, 22 aa, Artificial
  helical interface sequence
YLEQKMFAAMVADNQMAMVMLN

SEQ ID NO: 3060 - protein, 13 aa, Artificial
  helical interface sequence
AVLRKIVSFNLKK

SEQ ID NO: 3061 - protein, 16 aa, Artificial
  helical interface sequence
NLVADLVQEVQQARDL

SEQ ID NO: 3062 - protein, 26 aa, Artificial
  helical interface sequence
PLMFPRMLMKLVSLRTLSSVHSEQVF

SEQ ID NO: 3063 - protein, 22 aa, Artificial
  helical interface sequence
AAAIATLIFLLVGALAIVNLKA

SEQ ID NO: 3064 - protein, 19 aa, Artificial
  helical interface sequence
LRYLFHCLQMSSAYVQQMA

SEQ ID NO: 3065 - protein, 12 aa, Artificial
  helical interface sequence
PMNLWYKQYRNA

SEQ ID NO: 3066 - protein, 15 aa, Artificial
  helical interface sequence
PEVKRRIMLGTFALS

SEQ ID NO: 3067 - protein, 6 aa, Artificial
  helical interface sequence
DFVARN

SEQ ID NO: 3068 - protein, 32 aa, Artificial
  helical interface sequence
GAKADATNTYGLNQYLKALEIRRICHEMVAMF

SEQ ID NO: 3069 - protein, 15 aa, Artificial
  helical interface sequence
EEQIAEFKEAFSLFD

SEQ ID NO: 3070 - protein, 20 aa, Artificial
  helical interface sequence
EFTADVTIWEEGSEFVERLT

SEQ ID NO: 3071 - protein, 12 aa, Artificial
  helical interface sequence
LQYMKNVFKEKY

SEQ ID NO: 3072 - protein, 8 aa, Artificial
  helical interface sequence
SILESYSG

SEQ ID NO: 3073 - protein, 8 aa, Artificial
  helical interface sequence
DEDYYELI

SEQ ID NO: 3074 - protein, 9 aa, Artificial
  helical interface sequence
KILHRLLQE

SEQ ID NO: 3075 - protein, 18 aa, Artificial
  helical interface sequence
PEDLFETISQALLNAADR

SEQ ID NO: 3076 - protein, 5 aa, Artificial
  helical interface sequence
NFLVP

SEQ ID NO: 3077 - protein, 29 aa, Artificial
  helical interface sequence
SSAIGALQESVEAYLVSLFEDTNLAAIHA

SEQ ID NO: 3078 - protein, 93 aa, Artificial
  helical interface sequence
PAEVIRELIAYALDTIAENQAKNEHLQKENERLLRDWNDVQGRFEKAVSAKEALETDLYKRFILVLNEKKTKIRSLHNKLLNAAQEREKDIKQ

SEQ ID NO: 3079 - protein, 28 aa, Artificial
  helical interface sequence
VIVIINLITLAAALLHTKTWFELAPKAA

SEQ ID NO: 3080 - protein, 27 aa, Artificial
  helical interface sequence
EPVFWGLFGAGGMWSAIIAPVMILLVG

SEQ ID NO: 3081 - protein, 22 aa, Artificial
  helical interface sequence
FDNFVRCLVRLETLFKIFKQLD

SEQ ID NO: 3082 - protein, 70 aa, Artificial; identical to SEQ ID NO: 1741
  helical interface sequence

SEQ ID NO: 3083 - protein, 26 aa, Artificial
  helical interface sequence
AKEYARMEAAKDERQFGTLLDGLTRL

SEQ ID NO: 3084 - protein, 33 aa, Artificial
  helical interface sequence
PTWRDEFINRYWGAFLFNEYGLFNAHSQGAREA

SEQ ID NO: 3085 - protein, 13 aa, Artificial
  helical interface sequence
YAMKRHKWSVLKS

SEQ ID NO: 3086 - protein, 16 aa, Artificial
  helical interface sequence
VPKLYRSVIEDVINDV

SEQ ID NO: 3087 - protein, 39 aa, Artificial
  helical interface sequence
QVAYLEKIRADKLRAACIRIQKTIRGWLMRKKYMRMRRG

SEQ ID NO: 3088 - protein, 20 aa, Artificial
  helical interface sequence
IQMLLEAADYLERREREAEH

SEQ ID NO: 3089 - protein, 12 aa, Artificial
  helical interface sequence
PITEAIAAADNQ

SEQ ID NO: 3090 - protein, 25 aa, Artificial
  helical interface sequence
AVGKAKCARDIGYYLRMVTYCLVVG

SEQ ID NO: 3091 - protein, 11 aa, Artificial
  helical interface sequence
YQVEYAFKATN

SEQ ID NO: 3092 - protein, 12 aa, Artificial
  helical interface sequence
FQVEYAVKAVEN

SEQ ID NO: 3093 - protein, 12 aa, Artificial
  helical interface sequence
IVAAHGYFGRLI

SEQ ID NO: 3094 - protein, 9 aa, Artificial
  helical interface sequence
AAVELTRRH

SEQ ID NO: 3095 - protein, 19 aa, Artificial
  helical interface sequence
SSVVRRELFRLVARLKQIG

SEQ ID NO: 3096 - protein, 11 aa, Artificial
  helical interface sequence
AQMMRGRLRKI

SEQ ID NO: 3097 - protein, 25 aa, Artificial
  helical interface sequence
ELTWISGVILAVITVSFGVTGYSLP

SEQ ID NO: 3098 - protein, 15 aa, Artificial
  helical interface sequence
EDIKEEYRRKNIFTF

SEQ ID NO: 3099 - protein, 20 aa, Artificial
  helical interface sequence
QLERNIETIINTFHQYSVKL

SEQ ID NO: 3100 - protein, 23 aa, Artificial
  helical interface sequence
LVSGLIEARKYLEQLHRKLKNCK

SEQ ID NO: 3101 - protein, 8 aa, Artificial
  helical interface sequence
ERELLESY

SEQ ID NO: 3102 - protein, 12 aa, Artificial
  helical interface sequence
PETLHNVMWAMS

SEQ ID NO: 3103 - protein, 14 aa, Artificial
  helical interface sequence
LVPGAIILDTVLML

SEQ ID NO: 3104 - protein, 13 aa, Artificial
  helical interface sequence
FQVEYALEAIKQG

SEQ ID NO: 3105 - protein, 18 aa, Artificial
  helical interface sequence
PEDLFETISQALLNAADR

SEQ ID NO: 3106 - protein, 19 aa, Artificial
  helical interface sequence
ELAKHAVSEGTKAVTKYTS

SEQ ID NO: 3107 - protein, 14 aa, Artificial
  helical interface sequence
VVGPATLARCLVVY

SEQ ID NO: 3108 - protein, 7 aa, Artificial
  helical interface sequence
VGCGQYS

SEQ ID NO: 3109 - protein, 15 aa, Artificial
  helical interface sequence
EEQIAEFKEAFSLFD

SEQ ID NO: 3110 - protein, 28 aa, Artificial
  helical interface sequence
LYFVVNVIIPCLLFSFLTVLVFYLPTDS

SEQ ID NO: 3111 - protein, 14 aa, Artificial
  helical interface sequence
LNKDRRLLLREFYN

SEQ ID NO: 3112 - protein, 23 aa, Artificial
  helical interface sequence
AAVAVEFARLYAVELEHYEKLEG

SEQ ID NO: 3113 - protein, 29 aa, Artificial
  helical interface sequence
GFMLRYLHANGASLFFIAVYLHIFRGLYY

SEQ ID NO: 3114 - protein, 53 aa, Artificial
  helical interface sequence
LGSAVSLVQAQTNARAIAAMKNSIQATNRAVFEVKEGTQRLAIAVQAIQDHIN

SEQ ID NO: 3115 - protein, 9 aa, Artificial
  helical interface sequence
DKQWSRYLF

SEQ ID NO: 3116 - protein, 14 aa, Artificial
  helical interface sequence
VSAHRKAQKAVNLV

SEQ ID NO: 3117 - protein, 8 aa, Artificial
  helical interface sequence
LLLHLLKS

SEQ ID NO: 3118 - protein, 14 aa, Artificial
  helical interface sequence
RSTVAQLVQTLEQH

SEQ ID NO: 3119 - protein, 8 aa, Artificial
  helical interface sequence
WLPFARAA

SEQ ID NO: 3120 - protein, 25 aa, Artificial
  helical interface sequence
PEGLRVFYYLVQDLKCLVFSLIGLH

SEQ ID NO: 3121 - protein, 24 aa, Artificial
  helical interface sequence
LHDQVHLLECAWLEILMIGLVWRS

SEQ ID NO: 3122 - protein, 10 aa, Artificial
  helical interface sequence
QVVIDQFISS

SEQ ID NO: 3123 - protein, 8 aa, Artificial
  helical interface sequence
KSDLVNNL

SEQ ID NO: 3124 - protein, 17 aa, Artificial
  helical interface sequence
PMFLDQVAKFIIDNTKG

SEQ ID NO: 3125 - protein, 15 aa, Artificial
  helical interface sequence
EDAELVEIVKERLRN

SEQ ID NO: 3126 - protein, 18 aa, Artificial
  helical interface sequence
PEEREKKRQFEMKRKLHY

SEQ ID NO: 3127 - protein, 20 aa, Artificial
  helical interface sequence
TYDGFGLAWAISEYIATKIG

SEQ ID NO: 3128 - protein, 24 aa, Artificial
  helical interface sequence
ETLASLKSEAESLKGKLEEERAKL

SEQ ID NO: 3129 - protein, 32 aa, Artificial
  helical interface sequence
KLQNLAQRVFASKARLNYALNDKAQKYNTLIE

SEQ ID NO: 3130 - protein, 20 aa, Artificial
  helical interface sequence
NEFTTHILEVINAHMVLSKA

SEQ ID NO: 3131 - protein, 17 aa, Artificial
  helical interface sequence
TDEVLQFLESFIDEKEN

SEQ ID NO: 3132 - protein, 25 aa, Artificial
  helical interface sequence
QRGKDKCARDIGYYLRMVTYCLIAG

SEQ ID NO: 3133 - protein, 14 aa, Artificial
  helical interface sequence
KEFLLYLAGFVDGD

SEQ ID NO: 3134 - protein, 15 aa, Artificial
  helical interface sequence
VKEVMHYLGQYIMVK

SEQ ID NO: 3135 - protein, 12 aa, Artificial
  helical interface sequence
ELDRLLLELNAV

SEQ ID NO: 3136 - protein, 14 aa, Artificial
  helical interface sequence
LEFVNAIRRAAMLY

SEQ ID NO: 3137 - protein, 8 aa, Artificial
  helical interface sequence
RIKELRNL

SEQ ID NO: 3138 - protein, 64 aa, Artificial
  helical interface sequence
FTKQSSVASTRNTLKMAQDAERAGMNTLGMLGHQSEQLNNVEGNLDLMKVQNKVADEKVAELKK

SEQ ID NO: 3139 - protein, 19 aa, Artificial
  helical interface sequence
ELAKHAVSEGTKAVTKYTS

SEQ ID NO: 3140 - protein, 9 aa, Artificial
  helical interface sequence
WNAYIDNLM

SEQ ID NO: 3141 - protein, 35 aa, Artificial; identical to SEQ ID NO: 443
  helical interface sequence

SEQ ID NO: 3142 - protein, 8 aa, Artificial
  helical interface sequence
SELLKYLT

SEQ ID NO: 3143 - protein, 18 aa, Artificial
  helical interface sequence
DFDLHLLKVSEGTTILLK

SEQ ID NO: 3144 - protein, 17 aa, Artificial
  helical interface sequence
LTLLLIIALIIAIIVGI

SEQ ID NO: 3145 - protein, 15 aa, Artificial
  helical interface sequence
IDQVINSAAKTYYMS

SEQ ID NO: 3146 - protein, 16 aa, Artificial
  helical interface sequence
VRELAPILRQMIDSAG

SEQ ID NO: 3147 - protein, 11 aa, Artificial
  helical interface sequence
PLTVAGFLLGM

SEQ ID NO: 3148 - protein, 16 aa, Artificial
  helical interface sequence
REAVGFHFDLFLDELN

SEQ ID NO: 3149 - protein, 22 aa, Artificial
  helical interface sequence
YPEYVSIQREKDAGAYSVKAAL

SEQ ID NO: 3150 - protein, 17 aa, Artificial
  helical interface sequence
DDMMDDIYSYAYDFYNK

SEQ ID NO: 3151 - protein, 13 aa, Artificial
  helical interface sequence
IFEMYARTRDEGF

SEQ ID NO: 3152 - protein, 19 aa, Artificial
  helical interface sequence
YAGTLQSLGADIASEQAVL

SEQ ID NO: 3153 - protein, 13 aa, Artificial
  helical interface sequence
GEYRRRWKREVLG

SEQ ID NO: 3154 - protein, 21 aa, Artificial
  helical interface sequence
QAAMQMLKETINEEAAEWDRL

SEQ ID NO: 3155 - protein, 9 aa, Artificial
  helical interface sequence
LDALWDALT

SEQ ID NO: 3156 - protein, 12 aa, Artificial
  helical interface sequence
EQLGVEFFNQIN

SEQ ID NO: 3157 - protein, 5 aa, Artificial
  helical interface sequence
DFVAK

SEQ ID NO: 3158 - protein, 12 aa, Artificial
  helical interface sequence
SIYVYKVLKQVH

SEQ ID NO: 3159 - protein, 13 aa, Artificial
  helical interface sequence
TPYLQYAMSDFRE

SEQ ID NO: 3160 - protein, 6 aa, Artificial
  helical interface sequence
EVDFRH

SEQ ID NO: 3161 - protein, 14 aa, Artificial
  helical interface sequence
QDYKDMLAKKRDGF

SEQ ID NO: 3162 - protein, 30 aa, Artificial; identical to SEQ ID NO: 567
  helical interface sequence

SEQ ID NO: 3163 - protein, 10 aa, Artificial
  helical interface sequence
PRDAQHFTQR

SEQ ID NO: 3164 - protein, 13 aa, Artificial
  helical interface sequence
EDGDQGIVRLKEK

SEQ ID NO: 3165 - protein, 25 aa, Artificial
  helical interface sequence
TRRYAACIRDLDYYLRYATYAMLAG

SEQ ID NO: 3166 - protein, 7 aa, Artificial
  helical interface sequence
RADVFNS

SEQ ID NO: 3167 - protein, 13 aa, Artificial
  helical interface sequence
EQEALEKLAAYVQ

SEQ ID NO: 3168 - protein, 40 aa, Artificial
  helical interface sequence
KDAKDKLMTRILGEDQYLLERKKVQYEEYKKLYKKYKEEN

SEQ ID NO: 3169 - protein, 15 aa, Artificial
  helical interface sequence
EDMIVDVALDLLAAH

SEQ ID NO: 3170 - protein, 28 aa, Artificial
  helical interface sequence
EWKTVVGAAMFFIGFTALLLIWEKHYVY

SEQ ID NO: 3171 - protein, 27 aa, Artificial
  helical interface sequence
PWHGFSIGFAYGCGLLFAAHGATILAV

SEQ ID NO: 3172 - protein, 21 aa, Artificial
  helical interface sequence
HTIAAFLGGAAAQEVIKIITK

SEQ ID NO: 3173 - protein, 24 aa, Artificial
  helical interface sequence
NERTLDFHDSNVRNLYEKVKSQLK

SEQ ID NO: 3174 - protein, 18 aa, Artificial
  helical interface sequence
GPDYRVLVDKSRKVAHTS

SEQ ID NO: 3175 - protein, 20 aa, Artificial
  helical interface sequence
LFVPVTGLWMSAIGVVGLAL

SEQ ID NO: 3176 - protein, 60 aa, Artificial
  helical interface sequence
RRKFLERNRAAASRSRQKRKVWVQSLEKKAEDLSSLNGQLQSEVTLLRNEVAQLKQLLLA

SEQ ID NO: 3177 - protein, 12 aa, Artificial
  helical interface sequence
NCFMGCMDEHEL

SEQ ID NO: 3178 - protein, 11 aa, Artificial
  helical interface sequence
WRPIVQFLRYQ

SEQ ID NO: 3179 - protein, 28 aa, Artificial
  helical interface sequence
DTWAKIHFAIMFVGVNMTFFPQHFLGLS

SEQ ID NO: 3180 - protein, 14 aa, Artificial
  helical interface sequence
YSWIINGIEWAIAN

SEQ ID NO: 3181 - protein, 25 aa, Artificial
  helical interface sequence
ILGAVFYIVFIALFFGIAVGIIFAI

SEQ ID NO: 3182 - protein, 6 aa, Artificial
  helical interface sequence
DFVSRN

SEQ ID NO: 3183 - protein, 24 aa, Artificial
  helical interface sequence
LESQEQRARAALRERYLRSLLAMV

SEQ ID NO: 3184 - protein, 10 aa, Artificial
  helical interface sequence
YSHPRLFWLS

SEQ ID NO: 3185 - protein, 13 aa, Artificial
  helical interface sequence
EALGEFIFDKKLL

SEQ ID NO: 3186 - protein, 13 aa, Artificial
  helical interface sequence
EALGEFIFDKKLL

SEQ ID NO: 3187 - protein, 14 aa, Artificial
  helical interface sequence
LQDLLDAYVFWKED

SEQ ID NO: 3188 - protein, 11 aa, Artificial
  helical interface sequence
ALELLMAANFL

SEQ ID NO: 3189 - protein, 6 aa, Artificial
  helical interface sequence
RDCLIG

SEQ ID NO: 3190 - protein, 14 aa, Artificial
  helical interface sequence
RDEIANDRFEKFRN

SEQ ID NO: 3191 - protein, 52 aa, Artificial; identical to SEQ ID NO: 499
  helical interface sequence

SEQ ID NO: 3192 - protein, 9 aa, Artificial
  helical interface sequence
ADVKSSLVN

SEQ ID NO: 3193 - protein, 17 aa, Artificial
  helical interface sequence
RFETKALADAKAALEAL

SEQ ID NO: 3194 - protein, 29 aa, Artificial
  helical interface sequence
TTVSQMHIYTGMDRLGIGQYLSRIALMID

SEQ ID NO: 3195 - protein, 7 aa, Artificial
  helical interface sequence
PLQFFRQ

SEQ ID NO: 3196 - protein, 18 aa, Artificial
  helical interface sequence
RREIELSKVIREALESAV

SEQ ID NO: 3197 - protein, 10 aa, Artificial
  helical interface sequence
RSERKKWIHC

SEQ ID NO: 3198 - protein, 12 aa, Artificial
  helical interface sequence
KTTIHRIKQKEF

SEQ ID NO: 3199 - protein, 18 aa, Artificial
  helical interface sequence
DENILRNAVNLQVLKFHY

SEQ ID NO: 3200 - protein, 21 aa, Artificial
  helical interface sequence
IQQIYEWHRDYFLQELQRCLK

SEQ ID NO: 3201 - protein, 16 aa, Artificial
  helical interface sequence
IRNKIRAIGKMARVFS

SEQ ID NO: 3202 - protein, 24 aa, Artificial
  helical interface sequence
SLYNMGKHALVGLTQSAALELAPY

SEQ ID NO: 3203 - protein, 64 aa, Artificial; identical to SEQ ID NO: 3138
  helical interface sequence

SEQ ID NO: 3204 - protein, 24 aa, Artificial
  helical interface sequence
IEFRRTLTLSFFFKFYLTVLKKLG

SEQ ID NO: 3205 - protein, 12 aa, Artificial
  helical interface sequence
DDALDELSDSLG

SEQ ID NO: 3206 - protein, 15 aa, Artificial
  helical interface sequence
FSILNRKAIDFLLQR

SEQ ID NO: 3207 - protein, 21 aa, Artificial
  helical interface sequence
YYSFKDILGLTLMLTPFLTLA

SEQ ID NO: 3208 - protein, 25 aa, Artificial
  helical interface sequence
TRRYAACIRDLDYYLRYATYAMLAG

SEQ ID NO: 3209 - protein, 14 aa, Artificial
  helical interface sequence
AVLRKIVSFNLKKE

SEQ ID NO: 3210 - protein, 10 aa, Artificial
  helical interface sequence
AEYFAYQMRY

SEQ ID NO: 3211 - protein, 14 aa, Artificial
  helical interface sequence
EMGFAGIAVGAAMA

SEQ ID NO: 3212 - protein, 5 aa, Artificial
  helical interface sequence
TYYMS

SEQ ID NO: 3213 - protein, 5 aa, Artificial
  helical interface sequence
TYYMS

SEQ ID NO: 3214 - protein, 16 aa, Artificial
  helical interface sequence
NLVADLVQEVQQARDL

SEQ ID NO: 3215 - protein, 8 aa, Artificial
  helical interface sequence
EDEIRAEF

SEQ ID NO: 3216 - protein, 32 aa, Artificial; identical to SEQ ID NO: 990
  helical interface sequence

SEQ ID NO: 3217 - protein, 25 aa, Artificial
  helical interface sequence
TRRYAACIRDLDYYLRYATYAMLAG

SEQ ID NO: 3218 - protein, 11 aa, Artificial
  helical interface sequence
QSAWFYHRWLL

SEQ ID NO: 3219 - protein, 9 aa, Artificial
  helical interface sequence
IDEIIEAIE

SEQ ID NO: 3220 - protein, 22 aa, Artificial
  helical interface sequence
FFMEVAKLRAARMLWAKLVHQF

SEQ ID NO: 3221 - protein, 20 aa, Artificial
  helical interface sequence
EELLQVVQRIHELRTLAGYR

SEQ ID NO: 3222 - protein, 7 aa, Artificial
  helical interface sequence
PTALEDH

SEQ ID NO: 3223 - protein, 8 aa, Artificial
  helical interface sequence
SILESYSG

SEQ ID NO: 3224 - protein, 14 aa, Artificial
  helical interface sequence
PTARAALWQQICTY

SEQ ID NO: 3225 - protein, 11 aa, Artificial
  helical interface sequence
SYRVWKSLKEH

SEQ ID NO: 3226 - protein, 10 aa, Artificial
  helical interface sequence
AVFNSINYLN

SEQ ID NO: 3227 - protein, 22 aa, Artificial
  helical interface sequence
LQIADDFIESVVTAACQLARHR

SEQ ID NO: 3228 - protein, 14 aa, Artificial
  helical interface sequence
DEQIAAQVDYIVAN

SEQ ID NO: 3229 - protein, 16 aa, Artificial
  helical interface sequence
NVFAWALDVLAKRLRS

SEQ ID NO: 3230 - protein, 10 aa, Artificial
  helical interface sequence
ACQVACSEWN

SEQ ID NO: 3231 - protein, 6 aa, Artificial
  helical interface sequence
RLFDKL

SEQ ID NO: 3232 - protein, 15 aa, Artificial
  helical interface sequence
ADEIKRLGKRFKKLD

SEQ ID NO: 3233 - protein, 9 aa, Artificial
  helical interface sequence
KILHRLLQD

SEQ ID NO: 3234 - protein, 10 aa, Artificial
  helical interface sequence
ESAWNYLKGI

SEQ ID NO: 3235 - protein, 13 aa, Artificial
  helical interface sequence
FIDYAIEYSEKYA

SEQ ID NO: 3236 - protein, 11 aa, Artificial
  helical interface sequence
DEFIAHRLGLI

SEQ ID NO: 3237 - protein, 7 aa, Artificial
  helical interface sequence
ERELLES

SEQ ID NO: 3238 - protein, 35 aa, Artificial; identical to SEQ ID NO: 2532
  helical interface sequence

SEQ ID NO: 3239 - protein, 23 aa, Artificial
  helical interface sequence
AQGALANIAVDKANLDVMKERSN

SEQ ID NO: 3240 - protein, 28 aa, Artificial
  helical interface sequence
PEFLEQKRAEVDTVCRHNYEIFDNFLVP

SEQ ID NO: 3241 - protein, 12 aa, Artificial
  helical interface sequence
EEVLMSLVIEMG

SEQ ID NO: 3242 - protein, 53 aa, Artificial; identical to SEQ ID NO: 171
  helical interface sequence

SEQ ID NO: 3243 - protein, 12 aa, Artificial
  helical interface sequence
EETFKQIYAQFF

SEQ ID NO: 3244 - protein, 24 aa, Artificial
  helical interface sequence
DILLDYRLTLIDVIAHLCEMYRRS

SEQ ID NO: 3245 - protein, 8 aa, Artificial
  helical interface sequence
ETIIDAIT

SEQ ID NO: 3246 - protein, 13 aa, Artificial
  helical interface sequence
NCFMGCMDEHELN

SEQ ID NO: 3247 - protein, 11 aa, Artificial
  helical interface sequence
KPAIRRLARRG

SEQ ID NO: 3248 - protein, 11 aa, Artificial
  helical interface sequence
AMDVVYALKRQ

SEQ ID NO: 3249 - protein, 13 aa, Artificial
  helical interface sequence
QWWKLYSKVKPLL

SEQ ID NO: 3250 - protein, 15 aa, Artificial
  helical interface sequence
FLALVRAWAYIRTLG

SEQ ID NO: 3251 - protein, 35 aa, Artificial; identical to SEQ ID NO: 703
  helical interface sequence

SEQ ID NO: 3252 - protein, 13 aa, Artificial
  helical interface sequence
PYIRERVVDQLAH

SEQ ID NO: 3253 - protein, 20 aa, Artificial
  helical interface sequence
PEFKAHIARVLGGLDRVISM

SEQ ID NO: 3254 - protein, 39 aa, Artificial
  helical interface sequence
RPHQSRESLIMLLEEQLEYKRGEIREIEQVCKQVHDKLT

SEQ ID NO: 3255 - protein, 13 aa, Artificial
  helical interface sequence
EALGEFIFDKKLL

SEQ ID NO: 3256 - protein, 16 aa, Artificial
  helical interface sequence
LSLALYVFDEYLQKTV

SEQ ID NO: 3257 - protein, 13 aa, Artificial
  helical interface sequence
FQVEYALEAIKQG

SEQ ID NO: 3258 - protein, 16 aa, Artificial
  helical interface sequence
QKEIDRLNEVAKNLNE

SEQ ID NO: 3259 - protein, 8 aa, Artificial
  helical interface sequence
WKLLAKGL

SEQ ID NO: 3260 - protein, 7 aa, Artificial
  helical interface sequence
REQVEAA

SEQ ID NO: 3261 - protein, 16 aa, Artificial
  helical interface sequence
WADIINRANLGMEVMH

SEQ ID NO: 3262 - protein, 10 aa, Artificial
  helical interface sequence
MQDIMIVHKH

SEQ ID NO: 3263 - protein, 11 aa, Artificial
  helical interface sequence
EMERDCMIAHG

SEQ ID NO: 3264 - protein, 20 aa, Artificial
  helical interface sequence
EEEARYWAKKLEQLNAKLNS

SEQ ID NO: 3265 - protein, 16 aa, Artificial
  helical interface sequence
QQASSAFQFAQALIAD

SEQ ID NO: 3266 - protein, 17 aa, Artificial
  helical interface sequence
LTELHNKIVEMRERVAS

SEQ ID NO: 3267 - protein, 37 aa, Artificial; identical to SEQ ID NO: 935
  helical interface sequence

SEQ ID NO: 3268 - protein, 8 aa, Artificial
  helical interface sequence
LWLAKGLF

SEQ ID NO: 3269 - protein, 11 aa, Artificial
  helical interface sequence
KPAIRRLARRG

SEQ ID NO: 3270 - protein, 14 aa, Artificial
  helical interface sequence
RDEIANDRFEKFRN

SEQ ID NO: 3271 - protein, 33 aa, Artificial; identical to SEQ ID NO: 848
  helical interface sequence

SEQ ID NO: 3272 - protein, 22 aa, Artificial
  helical interface sequence
FNEFDNLRRGGIQFADTRGYAY

SEQ ID NO: 3273 - protein, 6 aa, Artificial
  helical interface sequence
FISTIG

SEQ ID NO: 3274 - protein, 14 aa, Artificial
  helical interface sequence
PYQAVMEASVYIAK

SEQ ID NO: 3275 - protein, 15 aa, Artificial
  helical interface sequence
TREGNDLYREMKETG

SEQ ID NO: 3276 - protein, 16 aa, Artificial
  helical interface sequence
AEEAVRLARLGRLLTG

SEQ ID NO: 3277 - protein, 16 aa, Artificial
  helical interface sequence
IYAWEALEVVLIGAAF

SEQ ID NO: 3278 - protein, 17 aa, Artificial
  helical interface sequence
RFETKALADAKAALEAL

SEQ ID NO: 3279 - protein, 6 aa, Artificial
  helical interface sequence
HKEVFY

SEQ ID NO: 3280 - protein, 13 aa, Artificial
  helical interface sequence
KGFKEQIYDVYRY

SEQ ID NO: 3281 - protein, 25 aa, Artificial
  helical interface sequence
HIPFAFAFAILAYLTLVLFRPVMMG

SEQ ID NO: 3282 - protein, 13 aa, Artificial
  helical interface sequence
DNADELLESFLEG

SEQ ID NO: 3283 - protein, 10 aa, Artificial
  helical interface sequence
TASLFDEANN

SEQ ID NO: 3284 - protein, 13 aa, Artificial
  helical interface sequence
KKEIGRCFKLILK

SEQ ID NO: 3285 - protein, 10 aa, Artificial
  helical interface sequence
VKSATHLLKY

SEQ ID NO: 3286 - protein, 32 aa, Artificial; identical to SEQ ID NO: 1262
  helical interface sequence

SEQ ID NO: 3287 - protein, 16 aa, Artificial
  helical interface sequence
PSWYLFQFHRLLQYAR

SEQ ID NO: 3288 - protein, 5 aa, Artificial
  helical interface sequence
WLDYF

SEQ ID NO: 3289 - protein, 14 aa, Artificial
  helical interface sequence
KEFLLYLAGFVDAD

SEQ ID NO: 3290 - protein, 14 aa, Artificial
  helical interface sequence
FATIIERSKKFING

SEQ ID NO: 3291 - protein, 20 aa, Artificial
  helical interface sequence
TTVTIPSAVYVAQLYHQVSK

SEQ ID NO: 3292 - protein, 20 aa, Artificial
  helical interface sequence
KVTAMKCFLLELQVISLESG

SEQ ID NO: 3293 - protein, 22 aa, Artificial
  helical interface sequence
IPDARNAALRAKAEAAEFRYKY

SEQ ID NO: 3294 - protein, 7 aa, Artificial
  helical interface sequence
EELNKLL

SEQ ID NO: 3295 - protein, 28 aa, Artificial
  helical interface sequence
FNKVNDHLYSMGYNIGCRLIEDFLARTA

SEQ ID NO: 3296 - protein, 28 aa, Artificial
  helical interface sequence
FNKVNDHLYSMGYNIGCRLIEDFLARTA

SEQ ID NO: 3297 - protein, 12 aa, Artificial
  helical interface sequence
PMNLWYKQYRNA

SEQ ID NO: 3298 - protein, 10 aa, Artificial
  helical interface sequence
ILHYIYKSSL

SEQ ID NO: 3299 - protein, 16 aa, Artificial
  helical interface sequence
AQVPLGAGIALACKYN

SEQ ID NO: 3300 - protein, 11 aa, Artificial
  helical interface sequence
HQDQSIRIQRM

SEQ ID NO: 3301 - protein, 23 aa, Artificial
  helical interface sequence
NFLRVIGKKLIAIRDRFLKRIGA

SEQ ID NO: 3302 - protein, 17 aa, Artificial
  helical interface sequence
PTDIQLYYQTLLIGRKE

SEQ ID NO: 3303 - protein, 61 aa, Artificial; identical to SEQ ID NO: 928
  helical interface sequence

SEQ ID NO: 3304 - protein, 10 aa, Artificial
  helical interface sequence
DQVLNMLYWV

SEQ ID NO: 3305 - protein, 27 aa, Artificial
  helical interface sequence
TAALEKLKSYFSTGELRVRAATTIAAN

SEQ ID NO: 3306 - protein, 25 aa, Artificial
  helical interface sequence
QEMTATCLRDLDYYLRLITYGIVAG

SEQ ID NO: 3307 - protein, 14 aa, Artificial
  helical interface sequence
YDALRRLLYMIYMS

SEQ ID NO: 3308 - protein, 8 aa, Artificial
  helical interface sequence
DEDYYELI

SEQ ID NO: 3309 - protein, 8 aa, Artificial
  helical interface sequence
DEDYYELI

SEQ ID NO: 3310 - protein, 23 aa, Artificial
  helical interface sequence
PAEVEALREKVYASLEAYCKHKY

SEQ ID NO: 3311 - protein, 22 aa, Artificial
  helical interface sequence
ATDVTTLNEMFRYKTNLYKLKE

SEQ ID NO: 3312 - protein, 18 aa, Artificial
  helical interface sequence
VEEVIKLVRDSFTSATER

SEQ ID NO: 3313 - protein, 27 aa, Artificial
  helical interface sequence
STEIQVAFGRFRQAKAGLEAAKALTSK

SEQ ID NO: 3314 - protein, 14 aa, Artificial
  helical interface sequence
PQMIAVLVDKMIRT

SEQ ID NO: 3315 - protein, 5 aa, Artificial
  helical interface sequence
NFLVP

SEQ ID NO: 3316 - protein, 14 aa, Artificial
  helical interface sequence
AKNYGRAVYECLRG

SEQ ID NO: 3317 - protein, 14 aa, Artificial
  helical interface sequence
AKNYGRAVYECLRG

SEQ ID NO: 3318 - protein, 10 aa, Artificial
  helical interface sequence
PQYRSRVVRE

SEQ ID NO: 3319 - protein, 22 aa, Artificial
  helical interface sequence
APDARVLSNYLRQQCNYSSLVF

SEQ ID NO: 3320 - protein, 19 aa, Artificial
  helical interface sequence
PVLSKLCVPVANQFINLAG

SEQ ID NO: 3321 - protein, 26 aa, Artificial
  helical interface sequence
MEGIHRWAIWMAVLVTLTGGIGILLS

SEQ ID NO: 3322 - protein, 25 aa, Artificial
  helical interface sequence
NRRMAACLRDGEIILRYVSYALLAG

SEQ ID NO: 3323 - protein, 9 aa, Artificial
  helical interface sequence
STAEQLSKY

SEQ ID NO: 3324 - protein, 12 aa, Artificial
  helical interface sequence
QEVVDKVMETLD

SEQ ID NO: 3325 - protein, 15 aa, Artificial
  helical interface sequence
EEQIAEFKEAFSLFD

SEQ ID NO: 3326 - protein, 14 aa, Artificial
  helical interface sequence
KEYWRYIGRSLQSK

SEQ ID NO: 3327 - protein, 33 aa, Artificial
  helical interface sequence
ITAIASILHRVSGVITFVAVGILLWLLGTSLSS

SEQ ID NO: 3328 - protein, 22 aa, Artificial
  helical interface sequence
PLSQCLFWALVADLLTLTWIGG

SEQ ID NO: 3329 - protein, 30 aa, Artificial
  helical interface sequence
TSTFALTIVVGALFFERAFDQGADAIYEHI

SEQ ID NO: 3330 - protein, 40 aa, Artificial; identical to SEQ ID NO: 3168
  helical interface sequence

SEQ ID NO: 3331 - protein, 32 aa, Artificial; identical to SEQ ID NO: 1080
  helical interface sequence

SEQ ID NO: 3332 - protein, 31 aa, Artificial
  helical interface sequence
LFVWSVMITAVLLLLSLPVLAAGITMLLTDR

SEQ ID NO: 3333 - protein, 32 aa, Artificial; identical to SEQ ID NO: 1080
  helical interface sequence

SEQ ID NO: 3334 - protein, 17 aa, Artificial
  helical interface sequence
EADEAQFVAGRIREAVE

SEQ ID NO: 3335 - protein, 29 aa, Artificial
  helical interface sequence
RRIENLNKKVDDGFLDIWTYNAELLVLLE

SEQ ID NO: 3336 - protein, 10 aa, Artificial
  helical interface sequence
YEELREQLSS

SEQ ID NO: 3337 - protein, 19 aa, Artificial
  helical interface sequence
TCMATPHVAGAAALILSKH

SEQ ID NO: 3338 - protein, 48 aa, Artificial; identical to SEQ ID NO: 1002
  helical interface sequence

SEQ ID NO: 3339 - protein, 24 aa, Artificial
  helical interface sequence
DILLDYRLTLIDVIAHLCEMYRRS

SEQ ID NO: 3340 - protein, 24 aa, Artificial
  helical interface sequence
ELDQLRQEAEQLKNQIRDARKACA

SEQ ID NO: 3341 - protein, 31 aa, Artificial; identical to SEQ ID NO: 2530
  helical interface sequence

SEQ ID NO: 3342 - protein, 31 aa, Artificial; identical to SEQ ID NO: 2530
  helical interface sequence

SEQ ID NO: 3343 - protein, 23 aa, Artificial
  helical interface sequence
AQLIAQSIGQAFSVAYQEFLRAN

SEQ ID NO: 3344 - protein, 5 aa, Artificial
  helical interface sequence
DRLRP

SEQ ID NO: 3345 - protein, 20 aa, Artificial
  helical interface sequence
QLERNIETIINTFHQYSVKL

SEQ ID NO: 3346 - protein, 11 aa, Artificial
  helical interface sequence
DDYVHEFCRYG

SEQ ID NO: 3347 - protein, 14 aa, Artificial
  helical interface sequence
YSGFYTFSLLDHHY

SEQ ID NO: 3348 - protein, 41 aa, Artificial; identical to SEQ ID NO: 2156
  helical interface sequence

SEQ ID NO: 3349 - protein, 16 aa, Artificial
  helical interface sequence
KLPFQRLVREIAQDFK

SEQ ID NO: 3350 - protein, 14 aa, Artificial
  helical interface sequence
MYDIGAVAMRLLTK

SEQ ID NO: 3351 - protein, 14 aa, Artificial
  helical interface sequence
QDYKDMLAKKRDGF

SEQ ID NO: 3352 - protein, 10 aa, Artificial
  helical interface sequence
IKEKFIFQKM

SEQ ID NO: 3353 - protein, 12 aa, Artificial
  helical interface sequence
DALNNIINNARD

SEQ ID NO: 3354 - protein, 17 aa, Artificial
  helical interface sequence
ITIPALFIAGWLFVSTG

SEQ ID NO: 3355 - protein, 26 aa, Artificial
  helical interface sequence
LQDIDQAENTARSTAVKLLEELKKHL

SEQ ID NO: 3356 - protein, 20 aa, Artificial
  helical interface sequence
FKEFLGTYNKLTETCFLDCV

SEQ ID NO: 3357 - protein, 17 aa, Artificial
  helical interface sequence
FKTQKEAAWAITNYTSG

SEQ ID NO: 3358 - protein, 20 aa, Artificial
  helical interface sequence
DAELQRLKNERHEEAELERL

SEQ ID NO: 3359 - protein, 10 aa, Artificial
  helical interface sequence
PNYRRRLVRW

SEQ ID NO: 3360 - protein, 17 aa, Artificial
  helical interface sequence
SVIGEKICRIIDYCTEN

SEQ ID NO: 3361 - protein, 18 aa, Artificial
  helical interface sequence
NNQKIVNLKEKVAQLEAQ

SEQ ID NO: 3362 - protein, 23 aa, Artificial
  helical interface sequence
AAVAVEFARLYAVELEHYEKLEG

SEQ ID NO: 3363 - protein, 10 aa, Artificial
  helical interface sequence
LMDLCRRTIR

SEQ ID NO: 3364 - protein, 16 aa, Artificial
  helical interface sequence
EKDVENLEALLPLIEG

SEQ ID NO: 3365 - protein, 18 aa, Artificial
  helical interface sequence
PFLATKINEAKDFLEKRG

SEQ ID NO: 3366 - protein, 20 aa, Artificial
  helical interface sequence
ELAKHAVSEGTKAVTKYTSS

SEQ ID NO: 3367 - protein, 5 aa, Artificial
  helical interface sequence
NAHFY

SEQ ID NO: 3368 - protein, 11 aa, Artificial
  helical interface sequence
YAGFVDLTTEC

SEQ ID NO: 3369 - protein, 25 aa, Artificial
  helical interface sequence
MDAYWKYQAEKEKKLYAIFDAFAQN

SEQ ID NO: 3370 - protein, 17 aa, Artificial
  helical interface sequence
SHVLSKVCMYFTYKVRY

SEQ ID NO: 3371 - protein, 26 aa, Artificial
  helical interface sequence
IESVHRWGWFFSLMVMVSASVGILLT

SEQ ID NO: 3372 - protein, 12 aa, Artificial
  helical interface sequence
FYKVYTVVDEMF

SEQ ID NO: 3373 - protein, 14 aa, Artificial
  helical interface sequence
VATHRKAQRAVNLI

SEQ ID NO: 3374 - protein, 14 aa, Artificial
  helical interface sequence
AGLAMGTMDIVKLH

SEQ ID NO: 3375 - protein, 14 aa, Artificial
  helical interface sequence
FEDFVTALSILLRG

SEQ ID NO: 3376 - protein, 14 aa, Artificial
  helical interface sequence
ILSHYVEIRRWQDI

SEQ ID NO: 3377 - protein, 21 aa, Artificial
  helical interface sequence
YKDSTLIMQLLRDNLTLWTSD

SEQ ID NO: 3378 - protein, 8 aa, Artificial
  helical interface sequence
EEECELVC

SEQ ID NO: 3379 - protein, 8 aa, Artificial
  helical interface sequence
QSVGEPGT

SEQ ID NO: 3380 - protein, 18 aa, Artificial
  helical interface sequence
YRYKALSYLLFNWIHPTY

SEQ ID NO: 3381 - protein, 16 aa, Artificial
  helical interface sequence
GTFLTQALNHMYKLRT

SEQ ID NO: 3382 - protein, 13 aa, Artificial
  helical interface sequence
LLQFNKMIKFETR

SEQ ID NO: 3383 - protein, 9 aa, Artificial
  helical interface sequence
WERFFSLTG

SEQ ID NO: 3384 - protein, 16 aa, Artificial
  helical interface sequence
IRNKIRAIGKMARVFS

SEQ ID NO: 3385 - protein, 24 aa, Artificial
  helical interface sequence
FKKMSEAKYQLQKIYNEIDEALKS

SEQ ID NO: 3386 - protein, 11 aa, Artificial
  helical interface sequence
VATWIFTIARN

SEQ ID NO: 3387 - protein, 24 aa, Artificial
  helical interface sequence
LQQELRYIEALSAIVETGQKMLEA

SEQ ID NO: 3388 - protein, 15 aa, Artificial
  helical interface sequence
VERAGHLLCDKAQKN

SEQ ID NO: 3389 - protein, 20 aa, Artificial
  helical interface sequence
ARVTAAIASNIWAAYDRNGN

SEQ ID NO: 3390 - protein, 28 aa, Artificial
  helical interface sequence
GWLIRSIHRWSASMMVLMMILHVFRVYL

SEQ ID NO: 3391 - protein, 22 aa, Artificial
  helical interface sequence
RKEYEKIEEILDIGLAKAMEET

SEQ ID NO: 3392 - protein, 26 aa, Artificial
  helical interface sequence
PRGWFTFAHAVFALLFFFGHIWHGAR

SEQ ID NO: 3393 - protein, 9 aa, Artificial
  helical interface sequence
EQVKSDIEN

SEQ ID NO: 3394 - protein, 16 aa, Artificial
  helical interface sequence
QVDNYCRHNYGVVESF

SEQ ID NO: 3395 - protein, 6 aa, Artificial
  helical interface sequence
FDILST

SEQ ID NO: 3396 - protein, 8 aa, Artificial
  helical interface sequence
DALSSDFT

SEQ ID NO: 3397 - protein, 16 aa, Artificial
  helical interface sequence
DSVRLLAVEACVNIAQ

SEQ ID NO: 3398 - protein, 30 aa, Artificial
  helical interface sequence
AILAYEKGWLAFSLAMLFVFIALIAYTLAT

SEQ ID NO: 3399 - protein, 15 aa, Artificial
  helical interface sequence
IDQVINSAAKTYYMS

SEQ ID NO: 3400 - protein, 15 aa, Artificial
  helical interface sequence
IDQVINSAAKTYYMS

SEQ ID NO: 3401 - protein, 10 aa, Artificial
  helical interface sequence
TEMITTLKKI

SEQ ID NO: 3402 - protein, 17 aa, Artificial
  helical interface sequence
RELLITDLLLRIEHYLQ

SEQ ID NO: 3403 - protein, 12 aa, Artificial
  helical interface sequence
YAAKLLFQELMA

SEQ ID NO: 3404 - protein, 14 aa, Artificial
  helical interface sequence
KRAVEYAIRASLAL

SEQ ID NO: 3405 - protein, 52 aa, Artificial
  helical interface sequence
TRRMLQLVEESKDAGIRTLVMLDEQGEQLDRVEEGMNHINQDMKEAEKNLKD

SEQ ID NO: 3406 - protein, 15 aa, Artificial
  helical interface sequence
DDELERILKELSNLE

SEQ ID NO: 3407 - protein, 22 aa, Artificial
  helical interface sequence
VVRGIDTLQKKVASILLALTQM

SEQ ID NO: 3408 - protein, 13 aa, Artificial
  helical interface sequence
ELTSLMAWVKQGQ

SEQ ID NO: 3409 - protein, 5 aa, Artificial
  helical interface sequence
DRLRP

SEQ ID NO: 3410 - protein, 22 aa, Artificial
  helical interface sequence
QFLTIARLRALREAWARIGEVF

SEQ ID NO: 3411 - protein, 19 aa, Artificial
  helical interface sequence
AQAGLNGWYLSQILHKEGQ

SEQ ID NO: 3412 - protein, 19 aa, Artificial
  helical interface sequence
AQAGLNGWYLSQILHKEGQ

SEQ ID NO: 3413 - protein, 29 aa, Artificial
  helical interface sequence
PEYWEQQTRIAKEWEQIYRVDLRTLRGYY

SEQ ID NO: 3414 - protein, 13 aa, Artificial
  helical interface sequence
KSSLLDAILVGLY

SEQ ID NO: 3415 - protein, 17 aa, Artificial
  helical interface sequence
RLPALRSIGLKCLEHLF

SEQ ID NO: 3416 - protein, 25 aa, Artificial
  helical interface sequence
NRRMAACLRDMEIILRYVTYAILAG

SEQ ID NO: 3417 - protein, 6 aa, Artificial
  helical interface sequence
DYFLCL

SEQ ID NO: 3418 - protein, 13 aa, Artificial
  helical interface sequence
TVALREIRRFQKS

SEQ ID NO: 3419 - protein, 22 aa, Artificial
  helical interface sequence
AADCSFWERLLARQCRIYELRN

SEQ ID NO: 3420 - protein, 19 aa, Artificial
  helical interface sequence
FLDLIQEGNQGLIRAVEKF

SEQ ID NO: 3421 - protein, 7 aa, Artificial
  helical interface sequence
TTFKALR

SEQ ID NO: 3422 - protein, 9 aa, Artificial
  helical interface sequence
AYSYIREAW

SEQ ID NO: 3423 - protein, 32 aa, Artificial; identical to SEQ ID NO: 1402
  helical interface sequence

SEQ ID NO: 3424 - protein, 26 aa, Artificial
  helical interface sequence
VIVIINLITLAAALLHTKTWFELAPK

SEQ ID NO: 3425 - protein, 9 aa, Artificial
  helical interface sequence
AYSYIREAW

SEQ ID NO: 3426 - protein, 20 aa, Artificial
  helical interface sequence
ELAKHAVSEGTKAVTKYTSA

SEQ ID NO: 3427 - protein, 10 aa, Artificial
  helical interface sequence
PLWKGMKRVF

SEQ ID NO: 3428 - protein, 16 aa, Artificial
  helical interface sequence
GSNIKTAVKNIFSLYN

SEQ ID NO: 3429 - protein, 7 aa, Artificial
  helical interface sequence
PQIRYMG

SEQ ID NO: 3430 - protein, 8 aa, Artificial
  helical interface sequence
ILENLRSK

SEQ ID NO: 3431 - protein, 9 aa, Artificial
  helical interface sequence
KILHRLLQE

SEQ ID NO: 3432 - protein, 14 aa, Artificial
  helical interface sequence
EDMIVDVALDLLAA

SEQ ID NO: 3433 - protein, 9 aa, Artificial
  helical interface sequence
SWFEEKANL

SEQ ID NO: 3434 - protein, 12 aa, Artificial
  helical interface sequence
MQCQRRFYEALH

SEQ ID NO: 3435 - protein, 20 aa, Artificial
  helical interface sequence
DEFKTTIQHFRHTALQAAIN

SEQ ID NO: 3436 - protein, 12 aa, Artificial
  helical interface sequence
KRILQAANEVIE

SEQ ID NO: 3437 - protein, 28 aa, Artificial
  helical interface sequence
PVVRIGLQYGFILFIMSEVMFFVAWFWA

SEQ ID NO: 3438 - protein, 23 aa, Artificial
  helical interface sequence
ATDVTTLNEMFRYKTNLYKLKEE

SEQ ID NO: 3439 - protein, 12 aa, Artificial
  helical interface sequence
NCFMGCMDEHEL

SEQ ID NO: 3440 - protein, 15 aa, Artificial
  helical interface sequence
KEYWRYIGRSLQSKH

SEQ ID NO: 3441 - protein, 12 aa, Artificial
  helical interface sequence
ATSLEREYLLLS

SEQ ID NO: 3442 - protein, 6 aa, Artificial
  helical interface sequence
DDFDAQ

SEQ ID NO: 3443 - protein, 5 aa, Artificial
  helical interface sequence
LDDFF

SEQ ID NO: 3444 - protein, 15 aa, Artificial
  helical interface sequence
SLEKQKGVTNLLIKY

SEQ ID NO: 3445 - protein, 8 aa, Artificial
  helical interface sequence
ERELLESY

SEQ ID NO: 3446 - protein, 19 aa, Artificial
  helical interface sequence
QTQLRQAVQLLTRTELTLK

SEQ ID NO: 3447 - protein, 9 aa, Artificial
  helical interface sequence
DTFWDYVSL

SEQ ID NO: 3448 - protein, 13 aa, Artificial
  helical interface sequence
FHRRELWEAIEAG

SEQ ID NO: 3449 - protein, 26 aa, Artificial
  helical interface sequence
VATELQAYAKLHLERSYDYLLSAAYF

SEQ ID NO: 3450 - protein, 26 aa, Artificial
  helical interface sequence
VATELQAYAKLHLERSYDYLLSAAYF

SEQ ID NO: 3451 - protein, 13 aa, Artificial
  helical interface sequence
EALGEFIFDKKLL

SEQ ID NO: 3452 - protein, 26 aa, Artificial
  helical interface sequence
VATELQAYAKLHLERSYDYLLSAAYF

SEQ ID NO: 3453 - protein, 19 aa, Artificial
  helical interface sequence
ELAKHAVSEGTKAVTKYTS

SEQ ID NO: 3454 - protein, 19 aa, Artificial
  helical interface sequence
ELAKHAVSEGTKAVTKYTS

SEQ ID NO: 3455 - protein, 26 aa, Artificial
  helical interface sequence
MRYIHANGASLFFLAVYIHIFRGLYY

SEQ ID NO: 3456 - protein, 20 aa, Artificial
  helical interface sequence
HLKQLEAESIHIIREVAAEF

SEQ ID NO: 3457 - protein, 13 aa, Artificial
  helical interface sequence
TAAQITQRKWEAA

SEQ ID NO: 3458 - protein, 35 aa, Artificial; identical to SEQ ID NO: 1057
  helical interface sequence

SEQ ID NO: 3459 - protein, 17 aa, Artificial
  helical interface sequence
NAIELARVVDRSLRDSK

SEQ ID NO: 3460 - protein, 13 aa, Artificial
  helical interface sequence
AGLAAIGAANSLG

SEQ ID NO: 3461 - protein, 25 aa, Artificial
  helical interface sequence
NRRMAACLRDMEIVLRYVSYAEIAG

SEQ ID NO: 3462 - protein, 15 aa, Artificial
  helical interface sequence
PATKSAIQREATRTF

SEQ ID NO: 3463 - protein, 38 aa, Artificial
  helical interface sequence
QVAYLEKIRADKLRAACIRIQKTIRGWLMRKKYMRMRR

SEQ ID NO: 3464 - protein, 13 aa, Artificial
  helical interface sequence
NTESYLKNVALKH

SEQ ID NO: 3465 - protein, 28 aa, Artificial
  helical interface sequence
RVLRSILENLRSKIQKLESDVSAQMEYC

SEQ ID NO: 3466 - protein, 11 aa, Artificial
  helical interface sequence
EREVYDLFGIV

SEQ ID NO: 3467 - protein, 17 aa, Artificial
  helical interface sequence
DVVREAQAGMVEFTLLN

SEQ ID NO: 3468 - protein, 49 aa, Artificial
  helical interface sequence
AVSLVQAQTNARAIAAMKNSIQATNRAVFEVKEGTQRLAIAVQAIQDHI

SEQ ID NO: 3469 - protein, 9 aa, Artificial
  helical interface sequence
VEHIKRYTS

SEQ ID NO: 3470 - protein, 12 aa, Artificial
  helical interface sequence
VFYLHSRLLERA

SEQ ID NO: 3471 - protein, 15 aa, Artificial
  helical interface sequence
KIQKLESDVSAQMEY

SEQ ID NO: 3472 - protein, 17 aa, Artificial
  helical interface sequence
RFETKALADAKAALEAL

SEQ ID NO: 3473 - protein, 6 aa, Artificial
  helical interface sequence
RLFDKL

SEQ ID NO: 3474 - protein, 23 aa, Artificial
  helical interface sequence
AYWKYQAEKEKKLYAIFDAFAQN

SEQ ID NO: 3475 - protein, 12 aa, Artificial
  helical interface sequence
WIIKKGFAEMFK

SEQ ID NO: 3476 - protein, 13 aa, Artificial
  helical interface sequence
TITFADIIDELSD

SEQ ID NO: 3477 - protein, 13 aa, Artificial
  helical interface sequence
DDIRILRDIEQYY

SEQ ID NO: 3478 - protein, 24 aa, Artificial
  helical interface sequence
HIPFAFAFAILAYLTLVLFRPVMM

SEQ ID NO: 3479 - protein, 22 aa, Artificial
  helical interface sequence
PVELSSIAHQLDEEERMRMAEG

SEQ ID NO: 3480 - protein, 6 aa, Artificial
  helical interface sequence
QGIAQD

SEQ ID NO: 3481 - protein, 10 aa, Artificial
  helical interface sequence
RSERKKWIHC

SEQ ID NO: 3482 - protein, 15 aa, Artificial
  helical interface sequence
RRECLYYLTIGCYKL

SEQ ID NO: 3483 - protein, 9 aa, Artificial
  helical interface sequence
DYLKRKIRS

SEQ ID NO: 3484 - protein, 15 aa, Artificial
  helical interface sequence
IRNKIRAIGKMARVF

SEQ ID NO: 3485 - protein, 11 aa, Artificial
  helical interface sequence
KAAVFEEIDTY

SEQ ID NO: 3486 - protein, 24 aa, Artificial
  helical interface sequence
SLYNMGKHALVGLTQSAALELAPY

SEQ ID NO: 3487 - protein, 13 aa, Artificial
  helical interface sequence
FQVEYAVKAVENG

SEQ ID NO: 3488 - protein, 23 aa, Artificial
  helical interface sequence
ATDVTTLNEMFRYKTNLYKLKEE

SEQ ID NO: 3489 - protein, 26 aa, Artificial
  helical interface sequence
DACIDQCLAKYMRSWNVISKAYISRI

SEQ ID NO: 3490 - protein, 24 aa, Artificial
  helical interface sequence
DACIDQCLAKYMRSWNVISKAYIS

SEQ ID NO: 3491 - protein, 20 aa, Artificial
  helical interface sequence
KQKVQMSIHQFTNICFKKCV

SEQ ID NO: 3492 - protein, 8 aa, Artificial
  helical interface sequence
SELLKYLT

SEQ ID NO: 3493 - protein, 18 aa, Artificial
  helical interface sequence
YRHLLLEDQRIRGLLEKE

SEQ ID NO: 3494 - protein, 11 aa, Artificial
  helical interface sequence
FKEQIYDVYRY

SEQ ID NO: 3495 - protein, 15 aa, Artificial
  helical interface sequence
IDQVINSAAKTYYMS

SEQ ID NO: 3496 - protein, 26 aa, Artificial
  helical interface sequence
HEQFLKALQNAVTTFVNRMKSNHMRG

SEQ ID NO: 3497 - protein, 16 aa, Artificial
  helical interface sequence
AEEYGAETLERMFITY

SEQ ID NO: 3498 - protein, 29 aa, Artificial
  helical interface sequence
SNIPTNLRVLRSILENLRSKIQKLESDVS

SEQ ID NO: 3499 - protein, 15 aa, Artificial
  helical interface sequence
LHDLVDYYYFWKEDG

SEQ ID NO: 3500 - protein, 41 aa, Artificial; identical to SEQ ID NO: 1069
  helical interface sequence

SEQ ID NO: 3501 - protein, 11 aa, Artificial
  helical interface sequence
SDEKRELLKRY

SEQ ID NO: 3502 - protein, 7 aa, Artificial
  helical interface sequence
VSENVIL

SEQ ID NO: 3503 - protein, 14 aa, Artificial
  helical interface sequence
KLPFQRLVREIAQD

SEQ ID NO: 3504 - protein, 32 aa, Artificial; identical to SEQ ID NO: 990
  helical interface sequence

SEQ ID NO: 3505 - protein, 11 aa, Artificial
  helical interface sequence
PEEIRKYLLLN

SEQ ID NO: 3506 - protein, 13 aa, Artificial
  helical interface sequence
PGELDRIKSFVSS

SEQ ID NO: 3507 - protein, 17 aa, Artificial
  helical interface sequence
MSQVAKDVCTFLRWAAE

SEQ ID NO: 3508 - protein, 5 aa, Artificial
  helical interface sequence
ACHDV

SEQ ID NO: 3509 - protein, 17 aa, Artificial
  helical interface sequence
TIVKLTICPTLKSMAKK

SEQ ID NO: 3510 - protein, 25 aa, Artificial
  helical interface sequence
NRRMAACLRDGEIILRYISYALLAG

SEQ ID NO: 3511 - protein, 29 aa, Artificial
  helical interface sequence
VQALKKRVQALKARNYAAKQKVQALRHKC

SEQ ID NO: 3512 - protein, 10 aa, Artificial
  helical interface sequence
RSERKKWIHC

SEQ ID NO: 3513 - protein, 15 aa, Artificial
  helical interface sequence
INSAARNIQHLLYGK

SEQ ID NO: 3514 - protein, 15 aa, Artificial
  helical interface sequence
DKKLAKLIDEVETLF

SEQ ID NO: 3515 - protein, 47 aa, Artificial; identical to SEQ ID NO: 1689
  helical interface sequence

SEQ ID NO: 3516 - protein, 27 aa, Artificial
  helical interface sequence
STEIQVAFGRFRQAKAGLEAAKALTSK

SEQ ID NO: 3517 - protein, 7 aa, Artificial
  helical interface sequence
VGCGQYS

SEQ ID NO: 3518 - protein, 22 aa, Artificial
  helical interface sequence
LQIADDFIESVVTAACQLARHR

SEQ ID NO: 3519 - protein, 27 aa, Artificial
  helical interface sequence
NTELQAVDGRFKRAVASMEAARALTNN

SEQ ID NO: 3520 - protein, 14 aa, Artificial
  helical interface sequence
AKNYGRAVYECLRG

SEQ ID NO: 3521 - protein, 8 aa, Artificial
  helical interface sequence
KRMALELF

SEQ ID NO: 3522 - protein, 12 aa, Artificial
  helical interface sequence
DERILAIYNALR

SEQ ID NO: 3523 - protein, 24 aa, Artificial
  helical interface sequence
LASLAIYSFWIFLAGLIYYLQTEN

SEQ ID NO: 3524 - protein, 19 aa, Artificial
  helical interface sequence
EDDSKLASRKYARIIQKIG

SEQ ID NO: 3525 - protein, 13 aa, Artificial
  helical interface sequence
LFQFGEMILQKTG

SEQ ID NO: 3526 - protein, 11 aa, Artificial
  helical interface sequence
ISSRVMAAIEE

SEQ ID NO: 3527 - protein, 13 aa, Artificial
  helical interface sequence
PWWAAFSRVCKDM

SEQ ID NO: 3528 - protein, 50 aa, Artificial; identical to SEQ ID NO: 605
  helical interface sequence

SEQ ID NO: 3529 - protein, 15 aa, Artificial
  helical interface sequence
INSAARNIQHLLYGK

SEQ ID NO: 3530 - protein, 12 aa, Artificial
  helical interface sequence
FFGHIWHGARTL

SEQ ID NO: 3531 - protein, 24 aa, Artificial
  helical interface sequence
RTSLYLGLLLILVLALLFSSYFFN

SEQ ID NO: 3532 - protein, 12 aa, Artificial
  helical interface sequence
ATSLEREYLLLS

SEQ ID NO: 3533 - protein, 7 aa, Artificial
  helical interface sequence
QAEIDAL

SEQ ID NO: 3534 - protein, 20 aa, Artificial
  helical interface sequence
WRDRFLFVAEAIYKAQAETG

SEQ ID NO: 3535 - protein, 8 aa, Artificial
  helical interface sequence
SSLDIVLH

SEQ ID NO: 3536 - protein, 6 aa, Artificial
  helical interface sequence
INRWLF

SEQ ID NO: 3537 - protein, 24 aa, Artificial
  helical interface sequence
PEGLREVALKSVEMAHKLHALLLE

SEQ ID NO: 3538 - protein, 23 aa, Artificial
  helical interface sequence
LSEARLVIKEALVERRRAFKRSQ

SEQ ID NO: 3539 - protein, 13 aa, Artificial
  helical interface sequence
FHRRELWEAIEAG

SEQ ID NO: 3540 - protein, 11 aa, Artificial
  helical interface sequence
KPFLLKKMEEK

SEQ ID NO: 3541 - protein, 13 aa, Artificial
  helical interface sequence
EALGEFIFDKKLL

SEQ ID NO: 3542 - protein, 13 aa, Artificial
  helical interface sequence
EALGEFIFDKKLL

SEQ ID NO: 3543 - protein, 13 aa, Artificial
  helical interface sequence
EALGEFIFDKKLL

SEQ ID NO: 3544 - protein, 7 aa, Artificial
  helical interface sequence
MMELAEI

SEQ ID NO: 3545 - protein, 15 aa, Artificial
  helical interface sequence
VSELAELVKKLEDKF

SEQ ID NO: 3546 - protein, 33 aa, Artificial; identical to SEQ ID NO: 3327
  helical interface sequence

SEQ ID NO: 3547 - protein, 21 aa, Artificial
  helical interface sequence
FYTKNLLLNEGIRAWMAPQDQ

SEQ ID NO: 3548 - protein, 19 aa, Artificial
  helical interface sequence
GLQNCATHTQPFWGSLTNR

SEQ ID NO: 3549 - protein, 13 aa, Artificial
  helical interface sequence
QKEIDRLNEVAKN

SEQ ID NO: 3550 - protein, 15 aa, Artificial
  helical interface sequence
PATKSAIQREATRTF

SEQ ID NO: 3551 - protein, 64 aa, Artificial; identical to SEQ ID NO: 150
  helical interface sequence

SEQ ID NO: 3552 - protein, 10 aa, Artificial
  helical interface sequence
VEYLRFALML

SEQ ID NO: 3553 - protein, 17 aa, Artificial
  helical interface sequence
LTELHNKIVEMRERVAS

SEQ ID NO: 3554 - protein, 17 aa, Artificial
  helical interface sequence
LTELHNKIVEMRERVAS

SEQ ID NO: 3555 - protein, 18 aa, Artificial
  helical interface sequence
LTELHNKIVEMRERVASG

SEQ ID NO: 3556 - protein, 18 aa, Artificial
  helical interface sequence
LTELHNKIVEMRERVASG

SEQ ID NO: 3557 - protein, 15 aa, Artificial
  helical interface sequence
REELKEMVVALLHES

SEQ ID NO: 3558 - protein, 11 aa, Artificial
  helical interface sequence
RNVRKWLVLRN

SEQ ID NO: 3559 - protein, 17 aa, Artificial
  helical interface sequence
SVIGEKICRIIDYCTEN

SEQ ID NO: 3560 - protein, 29 aa, Artificial
  helical interface sequence
ISTELSKVNASLQNTVKYIKESNHQLQSV

SEQ ID NO: 3561 - protein, 15 aa, Artificial
  helical interface sequence
PLDVVELVVRELENI

SEQ ID NO: 3562 - protein, 18 aa, Artificial
  helical interface sequence
PFLATKINEAKDFLEKRG

SEQ ID NO: 3563 - protein, 18 aa, Artificial
  helical interface sequence
PFLATKINEAKDFLEKRG

SEQ ID NO: 3564 - protein, 11 aa, Artificial
  helical interface sequence
YAGFVDLTTEC

SEQ ID NO: 3565 - protein, 8 aa, Artificial
  helical interface sequence
WLPFARAA

SEQ ID NO: 3566 - protein, 15 aa, Artificial
  helical interface sequence
KRELQVLYRGFKNEC

SEQ ID NO: 3567 - protein, 17 aa, Artificial
  helical interface sequence
RFETKALADAKAALEAL

SEQ ID NO: 3568 - protein, 16 aa, Artificial
  helical interface sequence
PDLRDRGYIYWRLLST

SEQ ID NO: 3569 - protein, 19 aa, Artificial
  helical interface sequence
VNQHLCGSHLVEALYLVCG

SEQ ID NO: 3570 - protein, 9 aa, Artificial
  helical interface sequence
DRLRPLSYP

SEQ ID NO: 3571 - protein, 27 aa, Artificial
  helical interface sequence
KALDDFCQSLVDYLSAGHFSIYERILH

SEQ ID NO: 3572 - protein, 18 aa, Artificial
  helical interface sequence
VNDERLGVKILTDIYKEA

SEQ ID NO: 3573 - protein, 19 aa, Artificial
  helical interface sequence
YRYKALSYLLFNWIHPTYG

SEQ ID NO: 3574 - protein, 29 aa, Artificial
  helical interface sequence
ADEIRTLVKDMWDTRIAKLRVSADSFVRQ

SEQ ID NO: 3575 - protein, 7 aa, Artificial
  helical interface sequence
RERFLKY

SEQ ID NO: 3576 - protein, 5 aa, Artificial
  helical interface sequence
WLDYF

SEQ ID NO: 3577 - protein, 34 aa, Artificial
  helical interface sequence
ITAEFLVKSKHRDLTALCKEYDELAETQGKLEEK

SEQ ID NO: 3578 - protein, 14 aa, Artificial
  helical interface sequence
PAEQDRLFRRVMDR

SEQ ID NO: 3579 - protein, 14 aa, Artificial
  helical interface sequence
KEFLLYLAGFVDGD

SEQ ID NO: 3580 - protein, 27 aa, Artificial
  helical interface sequence
GSDLESVQGNIQRSAARLEAAEKLAAG

SEQ ID NO: 3581 - protein, 14 aa, Artificial
  helical interface sequence
ERQKVHCLNTLFSR

SEQ ID NO: 3582 - protein, 11 aa, Artificial
  helical interface sequence
PGDLAEELRRN

SEQ ID NO: 3583 - protein, 20 aa, Artificial
  helical interface sequence
KVTAMKCFLLELQVISLESG

SEQ ID NO: 3584 - protein, 24 aa, Artificial
  helical interface sequence
LQQELRYIEALSAIVETGQKMLEA

SEQ ID NO: 3585 - protein, 15 aa, Artificial
  helical interface sequence
INSAARNIQHLLYGK

SEQ ID NO: 3586 - protein, 11 aa, Artificial
  helical interface sequence
IDNSVLKVVTN

SEQ ID NO: 3587 - protein, 14 aa, Artificial
  helical interface sequence
EERQFRKLFVQLAG

SEQ ID NO: 3588 - protein, 24 aa, Artificial
  helical interface sequence
RTSLYLGLLLILVLALLFSSYFFN

SEQ ID NO: 3589 - protein, 21 aa, Artificial
  helical interface sequence
ETITYVFIFACIIALFFFAIF

SEQ ID NO: 3590 - protein, 13 aa, Artificial
  helical interface sequence
TVALREIRRYQKS

SEQ ID NO: 3591 - protein, 6 aa, Artificial
  helical interface sequence
FDILST

SEQ ID NO: 3592 - protein, 22 aa, Artificial
  helical interface sequence
HVLEEKTVAGWVAENQTALLYL

SEQ ID NO: 3593 - protein, 26 aa, Artificial
  helical interface sequence
DACIDQCLAKYMRSWNVISKAYISRI

SEQ ID NO: 3594 - protein, 25 aa, Artificial
  helical interface sequence
TRRYAACIRDLDYYLRYATYAMLAG

SEQ ID NO: 3595 - protein, 14 aa, Artificial
  helical interface sequence
ESGIGGLAIGLALQ

SEQ ID NO: 3596 - protein, 14 aa, Artificial
  helical interface sequence
LDTVELVMALEEEF

SEQ ID NO: 3597 - protein, 16 aa, Artificial
  helical interface sequence
AQVPLGAGIALACKYN

SEQ ID NO: 3598 - protein, 25 aa, Artificial
  helical interface sequence
SPVELEKLVREKKRELMELRFQASI

SEQ ID NO: 3599 - protein, 8 aa, Artificial
  helical interface sequence
FLMEMLEA

SEQ ID NO: 3600 - protein, 7 aa, Artificial
  helical interface sequence
DKDFRVF

SEQ ID NO: 3601 - protein, 7 aa, Artificial
  helical interface sequence
SRLLERA

SEQ ID NO: 3602 - protein, 14 aa, Artificial
  helical interface sequence
WVDKVKDLTKSEMN

SEQ ID NO: 3603 - protein, 27 aa, Artificial
  helical interface sequence
EKEQIREDILENQFMDSRMQLAKLCYD

SEQ ID NO: 3604 - protein, 11 aa, Artificial
  helical interface sequence
LDQVLNMLYWV

SEQ ID NO: 3605 - protein, 20 aa, Artificial
  helical interface sequence
WRDRFLFCAEALYKAQAETG

SEQ ID NO: 3606 - protein, 22 aa, Artificial
  helical interface sequence
PLSQCLFWALVADLLTLTWIGG

SEQ ID NO: 3607 - protein, 23 aa, Artificial
  helical interface sequence
AQGALANIAVDKANLEIMTKRSN

SEQ ID NO: 3608 - protein, 17 aa, Artificial
  helical interface sequence
KICAAFVREAATLYVER

SEQ ID NO: 3609 - protein, 13 aa, Artificial
  helical interface sequence
DLGRMLLTSIVRG

SEQ ID NO: 3610 - protein, 8 aa, Artificial
  helical interface sequence
FEELRTFG

SEQ ID NO: 3611 - protein, 10 aa, Artificial
  helical interface sequence
VKFDKDIRRN

SEQ ID NO: 3612 - protein, 16 aa, Artificial
  helical interface sequence
ERVQKHLKALTSELAN

SEQ ID NO: 3613 - protein, 12 aa, Artificial
  helical interface sequence
AFAKVVAQADAR

SEQ ID NO: 3614 - protein, 10 aa, Artificial
  helical interface sequence
KAHLLSLVDV

SEQ ID NO: 3615 - protein, 11 aa, Artificial
  helical interface sequence
SYRVWKSLKEH

SEQ ID NO: 3616 - protein, 33 aa, Artificial
  helical interface sequence
PASAKYLNTDLNNAFWTQQKYFTPVLGMLFEYG

SEQ ID NO: 3617 - protein, 9 aa, Artificial
  helical interface sequence
DRLRPLSYP

SEQ ID NO: 3618 - protein, 11 aa, Artificial
  helical interface sequence
IKEKYIFQKMG

SEQ ID NO: 3619 - protein, 13 aa, Artificial
  helical interface sequence
DEYQELFRNKRQL

SEQ ID NO: 3620 - protein, 11 aa, Artificial
  helical interface sequence
LDWIDDTITEN

SEQ ID NO: 3621 - protein, 11 aa, Artificial
  helical interface sequence
LDWIDDTITEN

SEQ ID NO: 3622 - protein, 18 aa, Artificial
  helical interface sequence
GGMINKKCYEMASHLRRS

SEQ ID NO: 3623 - protein, 11 aa, Artificial
  helical interface sequence
TYNLVDQLRAS

SEQ ID NO: 3624 - protein, 22 aa, Artificial
  helical interface sequence
AADCQFWETWLGSQCRLHELRE

SEQ ID NO: 3625 - protein, 18 aa, Artificial
  helical interface sequence
LAKHAVSEGTKAVTKYTS

SEQ ID NO: 3626 - protein, 21 aa, Artificial
  helical interface sequence
LAIYSFWIFLAGLIYYLQTEN

SEQ ID NO: 3627 - protein, 21 aa, Artificial
  helical interface sequence
QVSQILRVEVDIDVALRACKG

SEQ ID NO: 3628 - protein, 31 aa, Artificial
  helical interface sequence
CGIADFFNKYRLTTDGELLEIEGLLQQATNS

SEQ ID NO: 3629 - protein, 31 aa, Artificial; identical to SEQ ID NO: 3628
  helical interface sequence

SEQ ID NO: 3630 - protein, 31 aa, Artificial; identical to SEQ ID NO: 3332
  helical interface sequence

SEQ ID NO: 3631 - protein, 28 aa, Artificial
  helical interface sequence
KWRLLAMMTLFFGSGFAAPFFIVRHQLL

SEQ ID NO: 3632 - protein, 16 aa, Artificial
  helical interface sequence
KETEFLRLKRTRLGLE

SEQ ID NO: 3633 - protein, 20 aa, Artificial
  helical interface sequence
PEHVIGVTVAFVIIEAILTY

SEQ ID NO: 3634 - protein, 8 aa, Artificial
  helical interface sequence
VQLRKKLE

SEQ ID NO: 3635 - protein, 24 aa, Artificial
  helical interface sequence
RTSLYLGLLLILVLALLFSSYFFN

SEQ ID NO: 3636 - protein, 22 aa, Artificial
  helical interface sequence
PQFALTNIAVLKHNLNSLIKRS

SEQ ID NO: 3637 - protein, 33 aa, Artificial
  helical interface sequence
SEARKGFSYLVTATTTVGVAYAAKNVVSQFVSS

SEQ ID NO: 3638 - protein, 7 aa, Artificial
  helical interface sequence
LRYIYSQ

SEQ ID NO: 3639 - protein, 8 aa, Artificial
  helical interface sequence
ETIIDAIT

SEQ ID NO: 3640 - protein, 11 aa, Artificial
  helical interface sequence
WRPIVQFLRYQ

SEQ ID NO: 3641 - protein, 11 aa, Artificial
  helical interface sequence
WRPIVQFLRYQ

SEQ ID NO: 3642 - protein, 20 aa, Artificial
  helical interface sequence
WRDRFLFVAEAIYKAQAETG

SEQ ID NO: 3643 - protein, 20 aa, Artificial
  helical interface sequence
WRDRFLFVAEAIYKAQAETG

SEQ ID NO: 3644 - protein, 11 aa, Artificial
  helical interface sequence
KEIYPYVIQEL

SEQ ID NO: 3645 - protein, 10 aa, Artificial
  helical interface sequence
QVGYWAVKIV

SEQ ID NO: 3646 - protein, 15 aa, Artificial
  helical interface sequence
QGELPQCFCRMCAVF

SEQ ID NO: 3647 - protein, 7 aa, Artificial
  helical interface sequence
LRPLSYP

SEQ ID NO: 3648 - protein, 5 aa, Artificial
  helical interface sequence
SEQLT

SEQ ID NO: 3649 - protein, 7 aa, Artificial
  helical interface sequence
PWTQRYF

SEQ ID NO: 3650 - protein, 10 aa, Artificial
  helical interface sequence
YSHPRLFWLS

SEQ ID NO: 3651 - protein, 20 aa, Artificial
  helical interface sequence
PEFQGHVVRVMGGLDILINA

SEQ ID NO: 3652 - protein, 13 aa, Artificial
  helical interface sequence
EALGEFIFDKKLL

SEQ ID NO: 3653 - protein, 35 aa, Artificial; identical to SEQ ID NO: 2686
  helical interface sequence

SEQ ID NO: 3654 - protein, 13 aa, Artificial
  helical interface sequence
EALGEFIFDKKLL

SEQ ID NO: 3655 - protein, 13 aa, Artificial
  helical interface sequence
FQVEYALEAIKQG

SEQ ID NO: 3656 - protein, 16 aa, Artificial
  helical interface sequence
QKEIDRLNEVAKNLNE

SEQ ID NO: 3657 - protein, 18 aa, Artificial
  helical interface sequence
LTELHNKIVEMRERVASG

SEQ ID NO: 3658 - protein, 17 aa, Artificial
  helical interface sequence
SSIREEVHRHLGTVALM

SEQ ID NO: 3659 - protein, 19 aa, Artificial
  helical interface sequence
ESRRKELLQRIIVELVEFI

SEQ ID NO: 3660 - protein, 21 aa, Artificial
  helical interface sequence
QDAIHYMTEQAPAAVIELENY

SEQ ID NO: 3661 - protein, 22 aa, Artificial
  helical interface sequence
FNEFDNLRRGGIQFADTRGYAY

SEQ ID NO: 3662 - protein, 28 aa, Artificial
  helical interface sequence
ISTELSKVNASLQNTVKYIKESNHQLQS

SEQ ID NO: 3663 - protein, 24 aa, Artificial
  helical interface sequence
AFLIIRLDRIIEKLRTKLDEAEKI

SEQ ID NO: 3664 - protein, 16 aa, Artificial
  helical interface sequence
LKKFRERLLEIVKSEE

SEQ ID NO: 3665 - protein, 11 aa, Artificial
  helical interface sequence
FFQFAEMIVKM

SEQ ID NO: 3666 - protein, 11 aa, Artificial
  helical interface sequence
LIKLVESRYVR

SEQ ID NO: 3667 - protein, 5 aa, Artificial
  helical interface sequence
GVYQL

SEQ ID NO: 3668 - protein, 11 aa, Artificial
  helical interface sequence
YAGFVDLTTEC

SEQ ID NO: 3669 - protein, 11 aa, Artificial
  helical interface sequence
LGQLVEAAIQA

SEQ ID NO: 3670 - protein, 22 aa, Artificial
  helical interface sequence
EEDTGVTNRDLISRRIKEYNNL

SEQ ID NO: 3671 - protein, 24 aa, Artificial
  helical interface sequence
LHDQVHLLECAWLEILMIGLVWRS

SEQ ID NO: 3672 - protein, 14 aa, Artificial
  helical interface sequence
AFQLRQLILRGLQD

SEQ ID NO: 3673 - protein, 10 aa, Artificial
  helical interface sequence
LMNVLKKIYE

SEQ ID NO: 3674 - protein, 7 aa, Artificial
  helical interface sequence
DSQWAAF

SEQ ID NO: 3675 - protein, 8 aa, Artificial
  helical interface sequence
PVYNTVAK

SEQ ID NO: 3676 - protein, 9 aa, Artificial
  helical interface sequence
DRLRPLSYP

SEQ ID NO: 3677 - protein, 14 aa, Artificial
  helical interface sequence
LEFVNAIRRASMLY

SEQ ID NO: 3678 - protein, 21 aa, Artificial
  helical interface sequence
KEFADNLDSDFKVRQYLTKEL

SEQ ID NO: 3679 - protein, 16 aa, Artificial
  helical interface sequence
VDEIGPQALARLLIVS

SEQ ID NO: 3680 - protein, 38 aa, Artificial
  helical interface sequence
FLKDFDREVEIRIKQIESDRQNLLKEVDNLYNIEILRL

SEQ ID NO: 3681 - protein, 15 aa, Artificial
  helical interface sequence
ITHIREMCDIADKYC

SEQ ID NO: 3682 - protein, 18 aa, Artificial
  helical interface sequence
FLTKGIELVQKAIDLDTA

SEQ ID NO: 3683 - protein, 16 aa, Artificial
  helical interface sequence
DEMNAELQSKLKDLFN

SEQ ID NO: 3684 - protein, 22 aa, Artificial
  helical interface sequence
WGRIVTIFAFGGVLLKKLKQES

SEQ ID NO: 3685 - protein, 6 aa, Artificial
  helical interface sequence
KSYLDD

SEQ ID NO: 3686 - protein, 9 aa, Artificial
  helical interface sequence
ENLLRGVFG

SEQ ID NO: 3687 - protein, 16 aa, Artificial
  helical interface sequence
VEELFEWFQSIREITW

SEQ ID NO: 3688 - protein, 16 aa, Artificial
  helical interface sequence
VDEVGGEAYGRLLVVY

SEQ ID NO: 3689 - protein, 15 aa, Artificial
  helical interface sequence
INSAARNIQHLLYGK

SEQ ID NO: 3690 - protein, 17 aa, Artificial
  helical interface sequence
QVGYWAVKIVSGVPEAI

SEQ ID NO: 3691 - protein, 5 aa, Artificial
  helical interface sequence
DRLRP

SEQ ID NO: 3692 - protein, 15 aa, Artificial
  helical interface sequence
TKALRGLCDVWEKWG

SEQ ID NO: 3693 - protein, 11 aa, Artificial
  helical interface sequence
TAMRDLYMKNG

SEQ ID NO: 3694 - protein, 25 aa, Artificial
  helical interface sequence
DACIDQCLAKYMRSWNVISKAYISR

SEQ ID NO: 3695 - protein, 15 aa, Artificial
  helical interface sequence
ELVNKISENCFEKCL

SEQ ID NO: 3696 - protein, 5 aa, Artificial
  helical interface sequence
PTLLF

SEQ ID NO: 3697 - protein, 17 aa, Artificial
  helical interface sequence
FAKKKTLLGLSKLAALA

SEQ ID NO: 3698 - protein, 12 aa, Artificial
  helical interface sequence
VGQFYFLIRKRI

SEQ ID NO: 3699 - protein, 8 aa, Artificial
  helical interface sequence
FSDLWKLL

SEQ ID NO: 3700 - protein, 17 aa, Artificial
  helical interface sequence
YLHRMTTLFCINVLSEV

SEQ ID NO: 3701 - protein, 24 aa, Artificial
  helical interface sequence
IEFRRTLTLSFFFKFYLTVLKKLG

SEQ ID NO: 3702 - protein, 5 aa, Artificial
  helical interface sequence
TYYMS

SEQ ID NO: 3703 - protein, 15 aa, Artificial
  helical interface sequence
IDQVINSAAKTYYMS

SEQ ID NO: 3704 - protein, 15 aa, Artificial
  helical interface sequence
IDQVINSAAKTYYMS

SEQ ID NO: 3705 - protein, 34 aa, Artificial
  helical interface sequence
THDSSIRYLQEIYNSNNQKIVNLKEKVAQLEAQC

SEQ ID NO: 3706 - protein, 6 aa, Artificial
  helical interface sequence
FAYVMA

SEQ ID NO: 3707 - protein, 11 aa, Artificial
  helical interface sequence
DEFIAHRLGLI

SEQ ID NO: 3708 - protein, 22 aa, Artificial
  helical interface sequence
WGRIVTIFAFEGILIKKLLRQQ

SEQ ID NO: 3709 - protein, 14 aa, Artificial
  helical interface sequence
GRNYGRVVYEGLKG

SEQ ID NO: 3710 - protein, 21 aa, Artificial
  helical interface sequence
RWFLVQIEELVRLEEKVAEVG

SEQ ID NO: 3711 - protein, 14 aa, Artificial
  helical interface sequence
PWSKGFLASSYASR

SEQ ID NO: 3712 - protein, 11 aa, Artificial
  helical interface sequence
DDRILEIYNAL

SEQ ID NO: 3713 - protein, 21 aa, Artificial
  helical interface sequence
DNEKDNYLKGVTKLFERIYST

SEQ ID NO: 3714 - protein, 16 aa, Artificial
  helical interface sequence
PFDVAMIFVGTMANRF

SEQ ID NO: 3715 - protein, 24 aa, Artificial
  helical interface sequence
VPKWNACAAVGTLAATLVNCGAGR

SEQ ID NO: 3716 - protein, 21 aa, Artificial
  helical interface sequence
ELAKHAVSEGTKAVTKYTSAK

SEQ ID NO: 3717 - protein, 19 aa, Artificial
  helical interface sequence
PASFENVRAKWYPEVRHHC

SEQ ID NO: 3718 - protein, 10 aa, Artificial
  helical interface sequence
RSERKKWIHC

SEQ ID NO: 3719 - protein, 7 aa, Artificial
  helical interface sequence
VGCGQYS

SEQ ID NO: 3720 - protein, 49 aa, Artificial
  helical interface sequence
HLEGEVNKIKSALLSTNKAVVSLSNGVSVLTSKVLDLKNYIDKQLLPIV

SEQ ID NO: 3721 - protein, 12 aa, Artificial
  helical interface sequence
AFTKVVSQADTR

SEQ ID NO: 3722 - protein, 7 aa, Artificial
  helical interface sequence
PWTQRFF

SEQ ID NO: 3723 - protein, 10 aa, Artificial
  helical interface sequence
VPNWHRDLVR

SEQ ID NO: 3724 - protein, 18 aa, Artificial
  helical interface sequence
RGYWQELIESIVWAHNKL

SEQ ID NO: 3725 - protein, 12 aa, Artificial
  helical interface sequence
GHQIVDLINNAF

SEQ ID NO: 3726 - protein, 18 aa, Artificial
  helical interface sequence
DSVLFYAITTLHNLLLHQ

SEQ ID NO: 3727 - protein, 15 aa, Artificial
  helical interface sequence
QKILQTFLHALTEKY

SEQ ID NO: 3728 - protein, 17 aa, Artificial
  helical interface sequence
HIPFAFAFAILAYLTLV

SEQ ID NO: 3729 - protein, 32 aa, Artificial; identical to SEQ ID NO: 1402
  helical interface sequence

SEQ ID NO: 3730 - protein, 32 aa, Artificial
  helical interface sequence
PEHDERKRLGLKTVIILSSLYLLSIWVKKFKW

SEQ ID NO: 3731 - protein, 29 aa, Artificial
  helical interface sequence
GLWQIITICATGAFVSWALREVEICRKLG

SEQ ID NO: 3732 - protein, 10 aa, Artificial
  helical interface sequence
ESAWNYLKGI

SEQ ID NO: 3733 - protein, 12 aa, Artificial
  helical interface sequence
FQQLKVRVEHQL

SEQ ID NO: 3734 - protein, 9 aa, Artificial
  helical interface sequence
EAVEQLLEE

SEQ ID NO: 3735 - protein, 27 aa, Artificial
  helical interface sequence
FHDKYGNAVLASGATFCVAVWVYMATQ

SEQ ID NO: 3736 - protein, 27 aa, Artificial
  helical interface sequence
FHDKYGNAVLASGATFCVAVWVYMATQ

SEQ ID NO: 3737 - protein, 11 aa, Artificial
  helical interface sequence
TCSVTCKNVWT

SEQ ID NO: 3738 - protein, 29 aa, Artificial
  helical interface sequence
LHWRAAGAATVLLVIVLLAGSYLAVLAER

SEQ ID NO: 3739 - protein, 14 aa, Artificial
  helical interface sequence
PDRITELLDAKEAA

SEQ ID NO: 3740 - protein, 12 aa, Artificial
  helical interface sequence
SDQLFGMCESLY

SEQ ID NO: 3741 - protein, 20 aa, Artificial
  helical interface sequence
ISDMQHIERLLKDLVTENAY

SEQ ID NO: 3742 - protein, 24 aa, Artificial
  helical interface sequence
RTSLYLGLLLILVLALLFSSYFFN

SEQ ID NO: 3743 - protein, 17 aa, Artificial
  helical interface sequence
DSRRSADALLRLQAMAG

SEQ ID NO: 3744 - protein, 12 aa, Artificial
  helical interface sequence
ATSLEREYLLLS

SEQ ID NO: 3745 - protein, 12 aa, Artificial
  helical interface sequence
IDEKVELYRLKF

SEQ ID NO: 3746 - protein, 25 aa, Artificial
  helical interface sequence
PKEQAIGLSVTFLSFLLPAGWVLYH

SEQ ID NO: 3747 - protein, 16 aa, Artificial
  helical interface sequence
LGDVRESIRRVEANKF

SEQ ID NO: 3748 - protein, 17 aa, Artificial
  helical interface sequence
AIEQMMAFETAKGFVAG

SEQ ID NO: 3749 - protein, 12 aa, Artificial
  helical interface sequence
NTLNLLTSARSD

SEQ ID NO: 3750 - protein, 10 aa, Artificial
  helical interface sequence
IFIPRLLMVD

SEQ ID NO: 3751 - protein, 16 aa, Artificial
  helical interface sequence
EPVLNTQLAHLAKQHE

SEQ ID NO: 3752 - protein, 24 aa, Artificial
  helical interface sequence
YQYKIQELRKLLKSLLLNYLELIG

SEQ ID NO: 3753 - protein, 21 aa, Artificial
  helical interface sequence
HTIAAFLGGAAAQEVIKIITK

SEQ ID NO: 3754 - protein, 16 aa, Artificial
  helical interface sequence
LSLALYVFDEYLQKTV

SEQ ID NO: 3755 - protein, 13 aa, Artificial
  helical interface sequence
EALGEFIFDKKLL

SEQ ID NO: 3756 - protein, 16 aa, Artificial
  helical interface sequence
LSLALYVFDEYLQKTV

SEQ ID NO: 3757 - protein, 16 aa, Artificial
  helical interface sequence
VSELAELVKKLEDKFG

SEQ ID NO: 3758 - protein, 10 aa, Artificial
  helical interface sequence
YEEFVQMMTA

SEQ ID NO: 3759 - protein, 9 aa, Artificial
  helical interface sequence
EKELFESYI

SEQ ID NO: 3760 - protein, 12 aa, Artificial
  helical interface sequence
EEEIREAFRVFD

SEQ ID NO: 3761 - protein, 35 aa, Artificial; identical to SEQ ID NO: 1057
  helical interface sequence

SEQ ID NO: 3762 - protein, 20 aa, Artificial
  helical interface sequence
KGESVCLDRCVSKYLDIHER

SEQ ID NO: 3763 - protein, 8 aa, Artificial
  helical interface sequence
VAEFVYIT

SEQ ID NO: 3764 - protein, 18 aa, Artificial
  helical interface sequence
RLEQILVKTQWAQSYGEA

SEQ ID NO: 3765 - protein, 15 aa, Artificial
  helical interface sequence
IREEVHRHLGTVALM

SEQ ID NO: 3766 - protein, 18 aa, Artificial
  helical interface sequence
LTELHNKIVEMRERVASG

SEQ ID NO: 3767 - protein, 16 aa, Artificial
  helical interface sequence
YYGRWLLTAARILVDK

SEQ ID NO: 3768 - protein, 16 aa, Artificial
  helical interface sequence
YYGRWLLTAARILVDK

SEQ ID NO: 3769 - protein, 9 aa, Artificial
  helical interface sequence
AAEVEFLAE

SEQ ID NO: 3770 - protein, 41 aa, Artificial
  helical interface sequence
DKELEAFREELKHFEAKIEKHNHYQKQLEIAHEKLRHAESV

SEQ ID NO: 3771 - protein, 22 aa, Artificial
  helical interface sequence
FNEFDNLRRGGIQFADTRGYAY

SEQ ID NO: 3772 - protein, 52 aa, Artificial; identical to SEQ ID NO: 499
  helical interface sequence

SEQ ID NO: 3773 - protein, 12 aa, Artificial
  helical interface sequence
FIDYAIEYSEKY

SEQ ID NO: 3774 - protein, 11 aa, Artificial
  helical interface sequence
LADQMSLLQSA

SEQ ID NO: 3775 - protein, 18 aa, Artificial
  helical interface sequence
PFLATKINEAKDFLEKRG

SEQ ID NO: 3776 - protein, 12 aa, Artificial
  helical interface sequence
LGSMLASIGQEI

SEQ ID NO: 3777 - protein, 11 aa, Artificial
  helical interface sequence
YAGFVDLTTEC

SEQ ID NO: 3778 - protein, 8 aa, Artificial
  helical interface sequence
WLPFARAA

SEQ ID NO: 3779 - protein, 9 aa, Artificial
  helical interface sequence
LEEVLAISR

SEQ ID NO: 3780 - protein, 25 aa, Artificial
  helical interface sequence
KDLLEQRRAAVDTYCRHNYGVGESF

SEQ ID NO: 3781 - protein, 14 aa, Artificial
  helical interface sequence
ANVRFNVAKSLQKI

SEQ ID NO: 3782 - protein, 18 aa, Artificial
  helical interface sequence
FRTRKEAAWAITNATSGG

SEQ ID NO: 3783 - protein, 19 aa, Artificial
  helical interface sequence
AAMVFEFLYKMCDVMAAYF

SEQ ID NO: 3784 - protein, 13 aa, Artificial
  helical interface sequence
PFCLNIKHKLRQQ

SEQ ID NO: 3785 - protein, 6 aa, Artificial
  helical interface sequence
KMTRIL

SEQ ID NO: 3786 - protein, 11 aa, Artificial
  helical interface sequence
PYQGRELAFKL

SEQ ID NO: 3787 - protein, 7 aa, Artificial
  helical interface sequence
DRQLRLW

SEQ ID NO: 3788 - protein, 6 aa, Artificial
  helical interface sequence
PDNNRN

SEQ ID NO: 3789 - protein, 7 aa, Artificial
  helical interface sequence
RQWQSLI

SEQ ID NO: 3790 - protein, 13 aa, Artificial
  helical interface sequence
WYIEALAQVFSER

SEQ ID NO: 3791 - protein, 10 aa, Artificial
  helical interface sequence
PMVRRAAASK

SEQ ID NO: 3792 - protein, 16 aa, Artificial
  helical interface sequence
EKDIAAYIKKEFDKKY

SEQ ID NO: 3793 - protein, 9 aa, Artificial
  helical interface sequence
SATTFRILA

SEQ ID NO: 3794 - protein, 14 aa, Artificial
  helical interface sequence
KAVYRVLLILPYAV

SEQ ID NO: 3795 - protein, 9 aa, Artificial
  helical interface sequence
WERFFSLTG

SEQ ID NO: 3796 - protein, 12 aa, Artificial
  helical interface sequence
GELVDTLQFVCG

SEQ ID NO: 3797 - protein, 27 aa, Artificial
  helical interface sequence
NTELQAANGRFQRATASMEAARALTSN

SEQ ID NO: 3798 - protein, 16 aa, Artificial
  helical interface sequence
VDEVGGEAYGRLLVVY

SEQ ID NO: 3799 - protein, 5 aa, Artificial
  helical interface sequence
LPSRM

SEQ ID NO: 3800 - protein, 24 aa, Artificial
  helical interface sequence
FKKMSEAKYQLQKIYNEIDEALKS

SEQ ID NO: 3801 - protein, 12 aa, Artificial
  helical interface sequence
YQVEYALESISH

SEQ ID NO: 3802 - protein, 13 aa, Artificial
  helical interface sequence
FQVEYAVKAVENG

SEQ ID NO: 3803 - protein, 14 aa, Artificial
  helical interface sequence
SVDLHTHCSYQLML

SEQ ID NO: 3804 - protein, 8 aa, Artificial
  helical interface sequence
RHLAEYLD

SEQ ID NO: 3805 - protein, 26 aa, Artificial
  helical interface sequence
PNDLLYVFPIVIMGSFACIVALAVLD

SEQ ID NO: 3806 - protein, 11 aa, Artificial
  helical interface sequence
IDNSVLKVVTN

SEQ ID NO: 3807 - protein, 8 aa, Artificial
  helical interface sequence
PWTQALKE

SEQ ID NO: 3808 - protein, 6 aa, Artificial
  helical interface sequence
FDILST

SEQ ID NO: 3809 - protein, 19 aa, Artificial
  helical interface sequence
LRYLFHCLQMSSAYVQQMA

SEQ ID NO: 3810 - protein, 8 aa, Artificial
  helical interface sequence
ASVDRYYH

SEQ ID NO: 3811 - protein, 28 aa, Artificial
  helical interface sequence
SMEAERVRVFHKQAFEYISIALRIDEDE

SEQ ID NO: 3812 - protein, 12 aa, Artificial
  helical interface sequence
THSTVLGLYNTL

SEQ ID NO: 3813 - protein, 15 aa, Artificial
  helical interface sequence
ERQYYQLFLNLLEAQ

SEQ ID NO: 3814 - protein, 13 aa, Artificial
  helical interface sequence
EDKMDQLLQMLQS

SEQ ID NO: 3815 - protein, 29 aa, Artificial
  helical interface sequence
PKDALKNACNSIINKLGALKTNFETEWNL

SEQ ID NO: 3816 - protein, 22 aa, Artificial
  helical interface sequence
NAPGAVANRVALEACVKARNEG

SEQ ID NO: 3817 - protein, 5 aa, Artificial
  helical interface sequence
MTDFY

SEQ ID NO: 3818 - protein, 32 aa, Artificial
  helical interface sequence
IAAIKYKQAAIKNEIAAIKQEIAAIEQMIAAI

SEQ ID NO: 3819 - protein, 16 aa, Artificial
  helical interface sequence
HKQITAKALERVFVVY

SEQ ID NO: 3820 - protein, 24 aa, Artificial
  helical interface sequence
SQEQDILRGYADGMNAWIKQINTK

SEQ ID NO: 3821 - protein, 9 aa, Artificial
  helical interface sequence
IDEIIEAIE

SEQ ID NO: 3822 - protein, 11 aa, Artificial
  helical interface sequence
DDRILEIYNAL

SEQ ID NO: 3823 - protein, 18 aa, Artificial
  helical interface sequence
PYVNILRGSIATFSASVG

SEQ ID NO: 3824 - protein, 7 aa, Artificial
  helical interface sequence
PTALEDH

SEQ ID NO: 3825 - protein, 10 aa, Artificial
  helical interface sequence
VEDFWALYNH

SEQ ID NO: 3826 - protein, 14 aa, Artificial
  helical interface sequence
GNKRLDVVNKITNN

SEQ ID NO: 3827 - protein, 14 aa, Artificial
  helical interface sequence
YQVEYAFKATNQTN

SEQ ID NO: 3828 - protein, 27 aa, Artificial
  helical interface sequence
STEIQVAFGRFRQAKAGLEAAKALTSK

SEQ ID NO: 3829 - protein, 27 aa, Artificial
  helical interface sequence
STEIQVAFGRFRQAKAGLEAAKALTSK

SEQ ID NO: 3830 - protein, 13 aa, Artificial
  helical interface sequence
YEQGCALDYLQKF

SEQ ID NO: 3831 - protein, 7 aa, Artificial
  helical interface sequence
PWLLEAE

SEQ ID NO: 3832 - protein, 7 aa, Artificial
  helical interface sequence
PWLLEAE

SEQ ID NO: 3833 - protein, 5 aa, Artificial
  helical interface sequence
FWDAM

SEQ ID NO: 3834 - protein, 15 aa, Artificial
  helical interface sequence
KEAFWDRCLSVINLM

SEQ ID NO: 3835 - protein, 12 aa, Artificial
  helical interface sequence
LVPLLKLARDYS

SEQ ID NO: 3836 - protein, 11 aa, Artificial
  helical interface sequence
TYNLVDQLRAS

SEQ ID NO: 3837 - protein, 13 aa, Artificial
  helical interface sequence
VFIGRLIEHMQEY

SEQ ID NO: 3838 - protein, 23 aa, Artificial
  helical interface sequence
AADTQAVADAVTYQLGFHSIELN

SEQ ID NO: 3839 - protein, 22 aa, Artificial
  helical interface sequence
AADCSFWERLLARQCRIYELRN

SEQ ID NO: 3840 - protein, 23 aa, Artificial
  helical interface sequence
AADTQAVADAVTYQLGFHSIELN

SEQ ID NO: 3841 - protein, 22 aa, Artificial
  helical interface sequence
AADCSFWERLLARQCRIYELRN

SEQ ID NO: 3842 - protein, 7 aa, Artificial
  helical interface sequence
FMLFVPV

SEQ ID NO: 3843 - protein, 15 aa, Artificial
  helical interface sequence
YGRQTLTHEIGHTLG

SEQ ID NO: 3844 - protein, 13 aa, Artificial
  helical interface sequence
PEAVLAAVRRAEG

SEQ ID NO: 3845 - protein, 8 aa, Artificial
  helical interface sequence
FINLIKSK

SEQ ID NO: 3846 - protein, 24 aa, Artificial
  helical interface sequence
LASLAIYSFWIFLAGLIYYLQTEN

SEQ ID NO: 3847 - protein, 32 aa, Artificial; identical to SEQ ID NO: 1402
  helical interface sequence

SEQ ID NO: 3848 - protein, 12 aa, Artificial
  helical interface sequence
MEEAIKTQKELC

SEQ ID NO: 3849 - protein, 21 aa, Artificial
  helical interface sequence
IWPFMASVGAFVMLFGAVLWM

SEQ ID NO: 3850 - protein, 17 aa, Artificial
  helical interface sequence
ASIEEERGQLIDLMIDA

SEQ ID NO: 3851 - protein, 9 aa, Artificial
  helical interface sequence
EKELFESYI

SEQ ID NO: 3852 - protein, 11 aa, Artificial
  helical interface sequence
REIWEQWWDNY

SEQ ID NO: 3853 - protein, 13 aa, Artificial
  helical interface sequence
EKELNRIKRWCIM

SEQ ID NO: 3854 - protein, 17 aa, Artificial
  helical interface sequence
DSKLASRKYARIIQKIG

SEQ ID NO: 3855 - protein, 32 aa, Artificial; identical to SEQ ID NO: 1282
  helical interface sequence

SEQ ID NO: 3856 - protein, 14 aa, Artificial
  helical interface sequence
HVNQEVIKRMLNLE

SEQ ID NO: 3857 - protein, 20 aa, Artificial
  helical interface sequence
WRDRFLFCAEALYKAQAETG

SEQ ID NO: 3858 - protein, 17 aa, Artificial
  helical interface sequence
PEDLFETISQALLNAAD

SEQ ID NO: 3859 - protein, 16 aa, Artificial
  helical interface sequence
DYGRQTFTHEIGHALG

SEQ ID NO: 3860 - protein, 19 aa, Artificial
  helical interface sequence
VPTASLWGAVGAVGLVWAT

SEQ ID NO: 3861 - protein, 12 aa, Artificial
  helical interface sequence
SREVQTAVRLLL

SEQ ID NO: 3862 - protein, 13 aa, Artificial
  helical interface sequence
ELPQCFCRMCAVF

SEQ ID NO: 3863 - protein, 15 aa, Artificial
  helical interface sequence
SLEKQKGVTNLLIKY

SEQ ID NO: 3864 - protein, 20 aa, Artificial
  helical interface sequence
GEDFDNRLVNHFVEEFKRKH

SEQ ID NO: 3865 - protein, 13 aa, Artificial
  helical interface sequence
FHRRELWEAIEAG

SEQ ID NO: 3866 - protein, 12 aa, Artificial
  helical interface sequence
APAAVIELENYG

SEQ ID NO: 3867 - protein, 27 aa, Artificial
  helical interface sequence
PAVDYSLAAALTLHGHWGLGQVITDYV

SEQ ID NO: 3868 - protein, 49 aa, Artificial; identical to SEQ ID NO: 2477
  helical interface sequence

SEQ ID NO: 3869 - protein, 12 aa, Artificial
  helical interface sequence
LRAQQSVRLMSE

SEQ ID NO: 3870 - protein, 19 aa, Artificial
  helical interface sequence
AKVFRTYNASITLDRWFKE

SEQ ID NO: 3871 - protein, 35 aa, Artificial; identical to SEQ ID NO: 1057
  helical interface sequence

SEQ ID NO: 3872 - protein, 25 aa, Artificial
  helical interface sequence
NRRMAACLRDMEIVLRYVSYAEIAG

SEQ ID NO: 3873 - protein, 12 aa, Artificial
  helical interface sequence
STDLTMLKRSVL

SEQ ID NO: 3874 - protein, 15 aa, Artificial
  helical interface sequence
PATKSAIQREATRTF

SEQ ID NO: 3875 - protein, 23 aa, Artificial
  helical interface sequence
ADFRAHCVRVVNGLDVAINMLND

SEQ ID NO: 3876 - protein, 16 aa, Artificial
  helical interface sequence
YYGRWLLTAARILVDK

SEQ ID NO: 3877 - protein, 16 aa, Artificial
  helical interface sequence
YYGRWLLTAARILVDK

SEQ ID NO: 3878 - protein, 21 aa, Artificial
  helical interface sequence
QDAIHYMTEQAPAAVIELENY

SEQ ID NO: 3879 - protein, 28 aa, Artificial
  helical interface sequence
DTPIKVANTGLYVLSAITFTGLCYFNYY

SEQ ID NO: 3880 - protein, 22 aa, Artificial
  helical interface sequence
FNEFDNLRRGGIQFADTRGYAY

SEQ ID NO: 3881 - protein, 23 aa, Artificial
  helical interface sequence
AAVAVEFARLYAVELEHYEKLEG

SEQ ID NO: 3882 - protein, 31 aa, Artificial
  helical interface sequence
DSMLAAARAWRSLDVEMTAVQRSFNRTLLSL

SEQ ID NO: 3883 - protein, 15 aa, Artificial
  helical interface sequence
TEHTVHWLVDAMSEF

SEQ ID NO: 3884 - protein, 50 aa, Artificial; identical to SEQ ID NO: 225
  helical interface sequence

SEQ ID NO: 3885 - protein, 16 aa, Artificial
  helical interface sequence
LFKNEMKRRRDFYAAH

SEQ ID NO: 3886 - protein, 12 aa, Artificial
  helical interface sequence
LGSMLASIGQEI

SEQ ID NO: 3887 - protein, 19 aa, Artificial
  helical interface sequence
ISVCNNATWAIGEISIQMG

SEQ ID NO: 3888 - protein, 35 aa, Artificial
  helical interface sequence
MQQVNVLKLTVEDLEKERDFYFGKLRNIELICQEN

SEQ ID NO: 3889 - protein, 11 aa, Artificial
  helical interface sequence
YAGFVDLTTEC

SEQ ID NO: 3890 - protein, 21 aa, Artificial
  helical interface sequence
QKLQDQIFNLMKYDSYSRFLK

SEQ ID NO: 3891 - protein, 22 aa, Artificial
  helical interface sequence
AYWKYQAEKEKKLYAIFDAFAQ

SEQ ID NO: 3892 - protein, 7 aa, Artificial
  helical interface sequence
PVHQIYQ

SEQ ID NO: 3893 - protein, 11 aa, Artificial
  helical interface sequence
WMCYKNAMELG

SEQ ID NO: 3894 - protein, 27 aa, Artificial
  helical interface sequence
QRLKRLVNEGIGYGLALEGITATDLRN

SEQ ID NO: 3895 - protein, 24 aa, Artificial
  helical interface sequence
LRDHIDYWKHMRLECAIYYKAREM

SEQ ID NO: 3896 - protein, 19 aa, Artificial
  helical interface sequence
VNQHLCGSHLVEALYLVCG

SEQ ID NO: 3897 - protein, 5 aa, Artificial
  helical interface sequence
RQWQS

SEQ ID NO: 3898 - protein, 8 aa, Artificial
  helical interface sequence
TLKFWDIF

SEQ ID NO: 3899 - protein, 13 aa, Artificial
  helical interface sequence
FSQVLDDLSARFI

SEQ ID NO: 3900 - protein, 18 aa, Artificial
  helical interface sequence
LSSSISQLKRIQRDFKGL

SEQ ID NO: 3901 - protein, 10 aa, Artificial
  helical interface sequence
DTIFQACLDH

SEQ ID NO: 3902 - protein, 8 aa, Artificial
  helical interface sequence
YHGVAAAF

SEQ ID NO: 3903 - protein, 11 aa, Artificial
  helical interface sequence
LGSLCTLFQKL

SEQ ID NO: 3904 - protein, 9 aa, Artificial
  helical interface sequence
WIDVYTRAT

SEQ ID NO: 3905 - protein, 6 aa, Artificial
  helical interface sequence
FEGNLA

SEQ ID NO: 3906 - protein, 16 aa, Artificial
  helical interface sequence
GTIKSRIRLALDRLRQ

SEQ ID NO: 3907 - protein, 22 aa, Artificial
  helical interface sequence
APDARVLSNYLRQQCNYSSLVF

SEQ ID NO: 3908 - protein, 15 aa, Artificial
  helical interface sequence
RVDAEEALVDLQLHT

SEQ ID NO: 3909 - protein, 25 aa, Artificial
  helical interface sequence
AILTLGWVSLLVVFTWSIAMVVWGR

SEQ ID NO: 3910 - protein, 6 aa, Artificial
  helical interface sequence
IEWLKN

SEQ ID NO: 3911 - protein, 21 aa, Artificial
  helical interface sequence
PQGGLQNIAVVKHNLGVLTKR

SEQ ID NO: 3912 - protein, 21 aa, Artificial
  helical interface sequence
PQGGLQNIAVVKHNLGVLTKR

SEQ ID NO: 3913 - protein, 21 aa, Artificial
  helical interface sequence
AAYLDDLRSKFLLENSVLKME

SEQ ID NO: 3914 - protein, 23 aa, Artificial
  helical interface sequence
LICGLRQLANETTQALQLFLRAT

SEQ ID NO: 3915 - protein, 30 aa, Artificial; identical to SEQ ID NO: 1386
  helical interface sequence

SEQ ID NO: 3916 - protein, 29 aa, Artificial
  helical interface sequence
AQDKLVAETEDRKNTLEEYIYTLRGKLEE

SEQ ID NO: 3917 - protein, 16 aa, Artificial
  helical interface sequence
VDEVGGEALGRLLVVY

SEQ ID NO: 3918 - protein, 18 aa, Artificial
  helical interface sequence
LSETLSTLRFGTSAKAAA

SEQ ID NO: 3919 - protein, 16 aa, Artificial
  helical interface sequence
VADCGAEALARLLIVY

SEQ ID NO: 3920 - protein, 28 aa, Artificial
  helical interface sequence
KNESSCLDRCVAKYFETNVQVGENMQKM

SEQ ID NO: 3921 - protein, 24 aa, Artificial
  helical interface sequence
AAEYYRAYLEGECVEWLHRYLKNG

SEQ ID NO: 3922 - protein, 16 aa, Artificial
  helical interface sequence
AQVPLGAGIALACKYN

SEQ ID NO: 3923 - protein, 6 aa, Artificial
  helical interface sequence
KILEDN

SEQ ID NO: 3924 - protein, 16 aa, Artificial
  helical interface sequence
VRELAPILRQMIDSAG

SEQ ID NO: 3925 - protein, 15 aa, Artificial
  helical interface sequence
PVRQAEDVNLLDQMS

SEQ ID NO: 3926 - protein, 7 aa, Artificial
  helical interface sequence
PQIRNLG

SEQ ID NO: 3927 - protein, 10 aa, Artificial
  helical interface sequence
FEYRARVVRE

SEQ ID NO: 3928 - protein, 16 aa, Artificial
  helical interface sequence
TWFDTMLGFAISAYAL

SEQ ID NO: 3929 - protein, 15 aa, Artificial
  helical interface sequence
EIDNLALLTALKDKY

SEQ ID NO: 3930 - protein, 23 aa, Artificial
  helical interface sequence
QWLYSARGDFFRATSRLTTDFGN

SEQ ID NO: 3931 - protein, 9 aa, Artificial
  helical interface sequence
IRKWLVLRN

SEQ ID NO: 3932 - protein, 13 aa, Artificial
  helical interface sequence
DLGRMLLTSIVRG

SEQ ID NO: 3933 - protein, 19 aa, Artificial
  helical interface sequence
ANAGLSGWYLSMYLHKEAW

SEQ ID NO: 3934 - protein, 18 aa, Artificial
  helical interface sequence
ENFKLLGNVLVTVLAIHF

SEQ ID NO: 3935 - protein, 10 aa, Artificial
  helical interface sequence
KILHRLLQEG

SEQ ID NO: 3936 - protein, 15 aa, Artificial
  helical interface sequence
QGTLFELILAANYLD

SEQ ID NO: 3937 - protein, 15 aa, Artificial
  helical interface sequence
KWEAEKIHIGFRQAY

SEQ ID NO: 3938 - protein, 21 aa, Artificial
  helical interface sequence
AADGDALVKRFKNSVKWYHFD

SEQ ID NO: 3939 - protein, 30 aa, Artificial; identical to SEQ ID NO: 567
  helical interface sequence

SEQ ID NO: 3940 - protein, 12 aa, Artificial
  helical interface sequence
PLTEAVSVADSQ

SEQ ID NO: 3941 - protein, 14 aa, Artificial
  helical interface sequence
VSEAAEIMYNRAQI

SEQ ID NO: 3942 - protein, 13 aa, Artificial
  helical interface sequence
YEQGCALDYLQKF

SEQ ID NO: 3943 - protein, 20 aa, Artificial
  helical interface sequence
WRDRFLFVAEAIYKAQAETG

SEQ ID NO: 3944 - protein, 12 aa, Artificial
  helical interface sequence
GHQIVDLINNAF

SEQ ID NO: 3945 - protein, 27 aa, Artificial
  helical interface sequence
TCGIADFLNNYQTSVDKDLRTLEGILY

SEQ ID NO: 3946 - protein, 27 aa, Artificial
  helical interface sequence
PFHGLSIAFLYGSALLFAMHGATILAV

SEQ ID NO: 3947 - protein, 10 aa, Artificial
  helical interface sequence
RPDAENWNSQ

SEQ ID NO: 3948 - protein, 32 aa, Artificial; identical to SEQ ID NO: 3730
  helical interface sequence

SEQ ID NO: 3949 - protein, 34 aa, Artificial; identical to SEQ ID NO: 1043
  helical interface sequence

SEQ ID NO: 3950 - protein, 13 aa, Artificial
  helical interface sequence
PDHEDTFFRDLVG

SEQ ID NO: 3951 - protein, 27 aa, Artificial
  helical interface sequence
PFHGLSIAFLYGSALLFAMHGATILAV

SEQ ID NO: 3952 - protein, 37 aa, Artificial; identical to SEQ ID NO: 1577
  helical interface sequence

SEQ ID NO: 3953 - protein, 21 aa, Artificial
  helical interface sequence
SPLEIAWTIVPIVILVAIGAF

SEQ ID NO: 3954 - protein, 16 aa, Artificial
  helical interface sequence
DLIYSILTQIASDVYG

SEQ ID NO: 3955 - protein, 16 aa, Artificial
  helical interface sequence
DLIYSILTQIASDVYG

SEQ ID NO: 3956 - protein, 15 aa, Artificial
  helical interface sequence
IQKLESDVSAQMEYC

SEQ ID NO: 3957 - protein, 11 aa, Artificial
  helical interface sequence
GPEAILELEHM

SEQ ID NO: 3958 - protein, 30 aa, Artificial; identical to SEQ ID NO: 233
  helical interface sequence

SEQ ID NO: 3959 - protein, 13 aa, Artificial
  helical interface sequence
LFQFARMINGKLG

SEQ ID NO: 3960 - protein, 11 aa, Artificial
  helical interface sequence
FQVEYSLEAIK

SEQ ID NO: 3961 - protein, 21 aa, Artificial
  helical interface sequence
FYTKNLLLNEGIRAWMAPQDQ

SEQ ID NO: 3962 - protein, 23 aa, Artificial
  helical interface sequence
TAPVAAVQAAVSNLVRVGKETVQ

SEQ ID NO: 3963 - protein, 12 aa, Artificial
  helical interface sequence
SREVQTAVRLLL

SEQ ID NO: 3964 - protein, 9 aa, Artificial
  helical interface sequence
RPDAEYWNS

SEQ ID NO: 3965 - protein, 28 aa, Artificial
  helical interface sequence
EWKTVVGAAMFFIGFTALLLIWEKHYVY

SEQ ID NO: 3966 - protein, 10 aa, Artificial
  helical interface sequence
LFCCLLRSRL

SEQ ID NO: 3967 - protein, 7 aa, Artificial
  helical interface sequence
MFPKILM

SEQ ID NO: 3968 - protein, 18 aa, Artificial
  helical interface sequence
KRAVRRLRTACERAKRTL

SEQ ID NO: 3969 - protein, 10 aa, Artificial
  helical interface sequence
YSHPRLFWLS

SEQ ID NO: 3970 - protein, 17 aa, Artificial
  helical interface sequence
LLQGRLFSYTDTQISRL

SEQ ID NO: 3971 - protein, 9 aa, Artificial
  helical interface sequence
IADIQGYNY

SEQ ID NO: 3972 - protein, 22 aa, Artificial
  helical interface sequence
YQYKIQELRKLLKSLLLNYLEL

SEQ ID NO: 3973 - protein, 7 aa, Artificial
  helical interface sequence
VLEYFIS

SEQ ID NO: 3974 - protein, 29 aa, Artificial
  helical interface sequence
DTPIKVANTGLYVLSAITFTGLCYFNYYD

SEQ ID NO: 3975 - protein, 13 aa, Artificial
  helical interface sequence
EALGEFIFDKKLL

SEQ ID NO: 3976 - protein, 48 aa, Artificial; identical to SEQ ID NO: 1509
  helical interface sequence

SEQ ID NO: 3977 - protein, 45 aa, Artificial
  helical interface sequence
KQIANQFNKAISQIQESLTTTSTALGKLQDVVNQNAQALNTLVKQ

SEQ ID NO: 3978 - protein, 20 aa, Artificial
  helical interface sequence
WEQNVHASMFCNAWQFLLKT

SEQ ID NO: 3979 - protein, 8 aa, Artificial
  helical interface sequence
PAEIAMFL

SEQ ID NO: 3980 - protein, 17 aa, Artificial
  helical interface sequence
LTELHNKIVEMRERVAS

SEQ ID NO: 3981 - protein, 16 aa, Artificial
  helical interface sequence
YYGRWLLTAARILVDK

SEQ ID NO: 3982 - protein, 7 aa, Artificial
  helical interface sequence
PLHTLMH

SEQ ID NO: 3983 - protein, 15 aa, Artificial
  helical interface sequence
PVAVIRTHVNRLKLQ

SEQ ID NO: 3984 - protein, 15 aa, Artificial
  helical interface sequence
PVAVIRTHVNRLKLQ

SEQ ID NO: 3985 - protein, 15 aa, Artificial
  helical interface sequence
NIYKAAKDVTTSLSK

SEQ ID NO: 3986 - protein, 15 aa, Artificial
  helical interface sequence
QSRIVEWKERLDKEF

SEQ ID NO: 3987 - protein, 10 aa, Artificial
  helical interface sequence
YDRLRPLSYP

SEQ ID NO: 3988 - protein, 11 aa, Artificial
  helical interface sequence
VFYLHSRLLER

SEQ ID NO: 3989 - protein, 9 aa, Artificial
  helical interface sequence
SLESCLKFA

SEQ ID NO: 3990 - protein, 15 aa, Artificial
  helical interface sequence
YAWEALEVVLIGAAF

SEQ ID NO: 3991 - protein, 13 aa, Artificial
  helical interface sequence
DDIRILRDIEQYY

SEQ ID NO: 3992 - protein, 5 aa, Artificial
  helical interface sequence
SRWWC

SEQ ID NO: 3993 - protein, 8 aa, Artificial
  helical interface sequence
WLPFARAA

SEQ ID NO: 3994 - protein, 9 aa, Artificial
  helical interface sequence
LEEVLAISR

SEQ ID NO: 3995 - protein, 31 aa, Artificial; identical to SEQ ID NO: 1294
  helical interface sequence

SEQ ID NO: 3996 - protein, 7 aa, Artificial
  helical interface sequence
DIYRKEW

SEQ ID NO: 3997 - protein, 27 aa, Artificial
  helical interface sequence
QRLKRLVNEGIGYGLALEGITATDLRN

SEQ ID NO: 3998 - protein, 15 aa, Artificial
  helical interface sequence
ILSHLDWVNNFGYQY

SEQ ID NO: 3999 - protein, 13 aa, Artificial
  helical interface sequence
TMGQVGRQLAIIG

SEQ ID NO: 4000 - protein, 18 aa, Artificial
  helical interface sequence
RAYIRKQINNIFYRFIYE

SEQ ID NO: 4001 - protein, 11 aa, Artificial
  helical interface sequence
DRQINQLAQRL

SEQ ID NO: 4002 - protein, 7 aa, Artificial
  helical interface sequence
RQWQSLI

SEQ ID NO: 4003 - protein, 15 aa, Artificial
  helical interface sequence
VADMLVKVNALIKDR

SEQ ID NO: 4004 - protein, 12 aa, Artificial
  helical interface sequence
EPWLALCEYRLG

SEQ ID NO: 4005 - protein, 24 aa, Artificial
  helical interface sequence
YFIIKDVFALAVVLLVFFAIVGFM

SEQ ID NO: 4006 - protein, 32 aa, Artificial; identical to SEQ ID NO: 462
  helical interface sequence

SEQ ID NO: 4007 - protein, 10 aa, Artificial
  helical interface sequence
DDLYEASAMD

SEQ ID NO: 4008 - protein, 18 aa, Artificial
  helical interface sequence
LSSSISQLKRIQRDFKGL

SEQ ID NO: 4009 - protein, 26 aa, Artificial
  helical interface sequence
PAISQAWIKHVAQILESQRDFLNALQ

SEQ ID NO: 4010 - protein, 12 aa, Artificial
  helical interface sequence
AFTKVAAQADTR

SEQ ID NO: 4011 - protein, 10 aa, Artificial
  helical interface sequence
DTIFQACLDH

SEQ ID NO: 4012 - protein, 10 aa, Artificial
  helical interface sequence
DTIFQACLDH

SEQ ID NO: 4013 - protein, 9 aa, Artificial
  helical interface sequence
LSRLLSYAG

SEQ ID NO: 4014 - protein, 6 aa, Artificial
  helical interface sequence
HCINTM

SEQ ID NO: 4015 - protein, 12 aa, Artificial
  helical interface sequence
VITEVIASADSQ

SEQ ID NO: 4016 - protein, 18 aa, Artificial
  helical interface sequence
SRIKFKLIDIKELRHDKN

SEQ ID NO: 4017 - protein, 23 aa, Artificial
  helical interface sequence
ATDVTTLNEMFRYKTNLYKLKEE

SEQ ID NO: 4018 - protein, 61 aa, Artificial; identical to SEQ ID NO: 337
  helical interface sequence

SEQ ID NO: 4019 - protein, 13 aa, Artificial
  helical interface sequence
TVALREIRRYQKS

SEQ ID NO: 4020 - protein, 8 aa, Artificial
  helical interface sequence
TIIGYAVT

SEQ ID NO: 4021 - protein, 18 aa, Artificial
  helical interface sequence
FAKKKTLLGLSKLAALAS

SEQ ID NO: 4022 - protein, 18 aa, Artificial
  helical interface sequence
KRAVRRLRTACERAKRTL

SEQ ID NO: 4023 - protein, 12 aa, Artificial
  helical interface sequence
VGQFYFLIRKRI

SEQ ID NO: 4024 - protein, 25 aa, Artificial
  helical interface sequence
TRRYAACIRDLDYYLRYATYAMLAG

SEQ ID NO: 4025 - protein, 11 aa, Artificial
  helical interface sequence
QYCRYQKCLAM

SEQ ID NO: 4026 - protein, 20 aa, Artificial
  helical interface sequence
VNQAKQMLYDYVERKRKENS

SEQ ID NO: 4027 - protein, 19 aa, Artificial
  helical interface sequence
HHAATVSFMKHLDNEQKAR

SEQ ID NO: 4028 - protein, 25 aa, Artificial
  helical interface sequence
PDLMPALMAVFQHVRTRIQSELDCQ

SEQ ID NO: 4029 - protein, 36 aa, Artificial; identical to SEQ ID NO: 1711
  helical interface sequence

SEQ ID NO: 4030 - protein, 24 aa, Artificial
  helical interface sequence
IEFRRTLTLSFFFKFYLTVLKKLG

SEQ ID NO: 4031 - protein, 40 aa, Artificial
  helical interface sequence
HFVDRLVFDLQSKLDRIISWGQQSIDLWIGYDRHVHKFIR

SEQ ID NO: 4032 - protein, 5 aa, Artificial
  helical interface sequence
TYYMS

SEQ ID NO: 4033 - protein, 15 aa, Artificial
  helical interface sequence
IDQVINSAAKTYYMS

SEQ ID NO: 4034 - protein, 17 aa, Artificial
  helical interface sequence
AQVPLGAGIALACKYNG

SEQ ID NO: 4035 - protein, 5 aa, Artificial
  helical interface sequence
SRWWC

SEQ ID NO: 4036 - protein, 35 aa, Artificial
  helical interface sequence
RRIENLNKKMEDGFLDVWTYNAELLVLMENERTLD

SEQ ID NO: 4037 - protein, 11 aa, Artificial
  helical interface sequence
HQDQSIRIQRM

SEQ ID NO: 4038 - protein, 16 aa, Artificial
  helical interface sequence
FTQILSTVEPKALEMV

SEQ ID NO: 4039 - protein, 13 aa, Artificial
  helical interface sequence
IFEMYARTRDEGF

SEQ ID NO: 4040 - protein, 21 aa, Artificial
  helical interface sequence
PKDALLKAIENIRGMTSHYID

SEQ ID NO: 4041 - protein, 11 aa, Artificial
  helical interface sequence
EMERDCMIAHG

SEQ ID NO: 4042 - protein, 11 aa, Artificial
  helical interface sequence
MMDVKRALEDA

SEQ ID NO: 4043 - protein, 25 aa, Artificial
  helical interface sequence
TRRYAACIRDLDYYLRYATYAMLAG

SEQ ID NO: 4044 - protein, 5 aa, Artificial
  helical interface sequence
IRQLI

SEQ ID NO: 4045 - protein, 14 aa, Artificial
  helical interface sequence
EAQRNGFIQSLKDD

SEQ ID NO: 4046 - protein, 26 aa, Artificial
  helical interface sequence
AHVLAASVEQATENFLEKGDKIAKES

SEQ ID NO: 4047 - protein, 9 aa, Artificial
  helical interface sequence
IDTLILDTI

SEQ ID NO: 4048 - protein, 19 aa, Artificial
  helical interface sequence
ANAGLSGWYLSMYLHKEAW

SEQ ID NO: 4049 - protein, 9 aa, Artificial
  helical interface sequence
FAAEVAAMS

SEQ ID NO: 4050 - protein, 14 aa, Artificial
  helical interface sequence
MESIHRWAWWCAVL

SEQ ID NO: 4051 - protein, 12 aa, Artificial
  helical interface sequence
PLRALYLIATNG

SEQ ID NO: 4052 - protein, 13 aa, Artificial
  helical interface sequence
STAIREISLLKEL

SEQ ID NO: 4053 - protein, 9 aa, Artificial
  helical interface sequence
KILHRLLQE

SEQ ID NO: 4054 - protein, 9 aa, Artificial
  helical interface sequence
LEELRKQRG

SEQ ID NO: 4055 - protein, 23 aa, Artificial
  helical interface sequence
ATDVTTLNEMFRYKTNLYKLKEE

SEQ ID NO: 4056 - protein, 30 aa, Artificial; identical to SEQ ID NO: 567
  helical interface sequence

SEQ ID NO: 4057 - protein, 46 aa, Artificial
  helical interface sequence
EGEVNKIKSALLSTNKAVVSLSNGVSVLTSKVLDLKNYIDKQLLPI

SEQ ID NO: 4058 - protein, 46 aa, Artificial; identical to SEQ ID NO: 4057
  helical interface sequence

SEQ ID NO: 4059 - protein, 15 aa, Artificial
  helical interface sequence
RQELIDQEKELLEKL

SEQ ID NO: 4060 - protein, 13 aa, Artificial
  helical interface sequence
AFTKVVSQADTRG

SEQ ID NO: 4061 - protein, 27 aa, Artificial
  helical interface sequence
STEIQVAFGRFRQAKAGLEAAKALTSK

SEQ ID NO: 4062 - protein, 22 aa, Artificial
  helical interface sequence
EQLSTANTHFAVDLFRALNESD

SEQ ID NO: 4063 - protein, 39 aa, Artificial; identical to SEQ ID NO: 1738
  helical interface sequence

SEQ ID NO: 4064 - protein, 18 aa, Artificial
  helical interface sequence
PEDLFETISQALLNAADR

SEQ ID NO: 4065 - protein, 39 aa, Artificial
  helical interface sequence
SLANATAAQQEVLEASYAMVQHIAKGIRILEARVARVEA

SEQ ID NO: 4066 - protein, 8 aa, Artificial
  helical interface sequence
ERELLESY

SEQ ID NO: 4067 - protein, 13 aa, Artificial
  helical interface sequence
PYLIAGKYAQDFG

SEQ ID NO: 4068 - protein, 12 aa, Artificial
  helical interface sequence
PDHEDTFFRDLV

SEQ ID NO: 4069 - protein, 19 aa, Artificial
  helical interface sequence
PVLSKLCVPVANQFINLAG

SEQ ID NO: 4070 - protein, 12 aa, Artificial
  helical interface sequence
VITTTISAADAA

SEQ ID NO: 4071 - protein, 12 aa, Artificial
  helical interface sequence
SDLLGWWLCERQ

SEQ ID NO: 4072 - protein, 23 aa, Artificial
  helical interface sequence
PRMNNLSYWLYVAGTSLAVASLF

SEQ ID NO: 4073 - protein, 11 aa, Artificial
  helical interface sequence
RYVAADAIELV

SEQ ID NO: 4074 - protein, 13 aa, Artificial
  helical interface sequence
STDIGSVASFLLS

SEQ ID NO: 4075 - protein, 13 aa, Artificial
  helical interface sequence
STDIGSVASFLLS

SEQ ID NO: 4076 - protein, 13 aa, Artificial
  helical interface sequence
YAAKLLFQELMAM

SEQ ID NO: 4077 - protein, 17 aa, Artificial
  helical interface sequence
EPQKFAEELIHRLEAVQ

SEQ ID NO: 4078 - protein, 40 aa, Artificial
  helical interface sequence
LLARRLRFHIVGAFMVSLGFATFYKFAVAEKRKKAYADFY

SEQ ID NO: 4079 - protein, 40 aa, Artificial; identical to SEQ ID NO: 4078
  helical interface sequence

SEQ ID NO: 4080 - protein, 9 aa, Artificial
  helical interface sequence
DRLRPLSYP

SEQ ID NO: 4081 - protein, 14 aa, Artificial
  helical interface sequence
ITDIVSSLQLQFES

SEQ ID NO: 4082 - protein, 22 aa, Artificial
  helical interface sequence
YNEFENLRRAGIVHADMRGYSY

SEQ ID NO: 4083 - protein, 17 aa, Artificial
  helical interface sequence
QVGYWAVKIVTGVPDAI

SEQ ID NO: 4084 - protein, 22 aa, Artificial
  helical interface sequence
IPDGRHLVNRGREEAASFKKLY

SEQ ID NO: 4085 - protein, 12 aa, Artificial
  helical interface sequence
GQIDYALTAVKQ

SEQ ID NO: 4086 - protein, 23 aa, Artificial
  helical interface sequence
NADSRILIEKARVEAQSHRLTLE

SEQ ID NO: 4087 - protein, 24 aa, Artificial
  helical interface sequence
RTSLYLGLLLILVLALLFSSYFFN

SEQ ID NO: 4088 - protein, 35 aa, Artificial; identical to SEQ ID NO: 2150
  helical interface sequence

SEQ ID NO: 4089 - protein, 7 aa, Artificial
  helical interface sequence
LYFPYAN

SEQ ID NO: 4090 - protein, 22 aa, Artificial
  helical interface sequence
YPEYVSIQREKDSGAYSIKAAL

SEQ ID NO: 4091 - protein, 12 aa, Artificial
  helical interface sequence
ESFARVTVAAFV

SEQ ID NO: 4092 - protein, 22 aa, Artificial
  helical interface sequence
KETLSERLSALQDKIIDHYEND

SEQ ID NO: 4093 - protein, 20 aa, Artificial
  helical interface sequence
WRDRFLFVAEAIYKAQAETG

SEQ ID NO: 4094 - protein, 30 aa, Artificial
  helical interface sequence
ATDNILYRVTMTLCLGGTLYSLYCLGWASF

SEQ ID NO: 4095 - protein, 5 aa, Artificial
  helical interface sequence
KRSFS

SEQ ID NO: 4096 - protein, 13 aa, Artificial
  helical interface sequence
SEEEIREAFRVFD

SEQ ID NO: 4097 - protein, 7 aa, Artificial
  helical interface sequence
KILHRLL

SEQ ID NO: 4098 - protein, 5 aa, Artificial
  helical interface sequence
KRKED

SEQ ID NO: 4099 - protein, 17 aa, Artificial
  helical interface sequence
PFEQRHIVDGFSFELSK

SEQ ID NO: 4100 - protein, 9 aa, Artificial
  helical interface sequence
DTFWDYVSL

SEQ ID NO: 4101 - protein, 20 aa, Artificial
  helical interface sequence
PAFRAHATRVLGGLDMCIAL

SEQ ID NO: 4102 - protein, 9 aa, Artificial
  helical interface sequence
YCRHNYGVV

SEQ ID NO: 4103 - protein, 16 aa, Artificial
  helical interface sequence
LSLALYVFDEYLQKTV

SEQ ID NO: 4104 - protein, 29 aa, Artificial
  helical interface sequence
SKAMSIMNSFVNDVFERIAGEASRLAHYN

SEQ ID NO: 4105 - protein, 17 aa, Artificial
  helical interface sequence
ENSIELARVVDRGIRES

SEQ ID NO: 4106 - protein, 14 aa, Artificial
  helical interface sequence
NSLANVLSQHLNQK

SEQ ID NO: 4107 - protein, 10 aa, Artificial
  helical interface sequence
ELDQLRQEAE

SEQ ID NO: 4108 - protein, 12 aa, Artificial
  helical interface sequence
DEEVDEMIREAD

SEQ ID NO: 4109 - protein, 12 aa, Artificial
  helical interface sequence
PITEAIASADSQ

SEQ ID NO: 4110 - protein, 29 aa, Artificial
  helical interface sequence
KEARAAIARAASVFAIFVTSSSTALAHKQ

SEQ ID NO: 4111 - protein, 5 aa, Artificial
  helical interface sequence
EWYRS

SEQ ID NO: 4112 - protein, 17 aa, Artificial
  helical interface sequence
LTELHNKIVEMRERVAS

SEQ ID NO: 4113 - protein, 16 aa, Artificial
  helical interface sequence
YYGRWLLTAARILVDK

SEQ ID NO: 4114 - protein, 6 aa, Artificial
  helical interface sequence
LAPMYY

SEQ ID NO: 4115 - protein, 14 aa, Artificial
  helical interface sequence
RIRYVLSSYLRCRL

SEQ ID NO: 4116 - protein, 14 aa, Artificial
  helical interface sequence
RIRYVLSSYLRCRL

SEQ ID NO: 4117 - protein, 23 aa, Artificial
  helical interface sequence
AAVAVEFARLYAVELEHYEKLEG

SEQ ID NO: 4118 - protein, 52 aa, Artificial; identical to SEQ ID NO: 499
  helical interface sequence

SEQ ID NO: 4119 - protein, 5 aa, Artificial
  helical interface sequence
FWDLY

SEQ ID NO: 4120 - protein, 5 aa, Artificial
  helical interface sequence
FWDLY

SEQ ID NO: 4121 - protein, 5 aa, Artificial
  helical interface sequence
FWDLY

SEQ ID NO: 4122 - protein, 32 aa, Artificial; identical to SEQ ID NO: 2858
  helical interface sequence

SEQ ID NO: 4123 - protein, 10 aa, Artificial
  helical interface sequence
DWAESTLMTQ

SEQ ID NO: 4124 - protein, 11 aa, Artificial
  helical interface sequence
LEAIIRKALMG

SEQ ID NO: 4125 - protein, 16 aa, Artificial
  helical interface sequence
EEELVKLVTHFEEMTE

SEQ ID NO: 4126 - protein, 12 aa, Artificial
  helical interface sequence
LGSMLASIGQEI

SEQ ID NO: 4127 - protein, 12 aa, Artificial
  helical interface sequence
LGSMLASIGQEI

SEQ ID NO: 4128 - protein, 11 aa, Artificial
  helical interface sequence
KPAIRRLARRG

SEQ ID NO: 4129 - protein, 16 aa, Artificial
  helical interface sequence
AVDTYCRHNYGVGESF

SEQ ID NO: 4130 - protein, 47 aa, Artificial
  helical interface sequence
VPARDYLIDGSRGILSGTSDLLLTFDEAEVRKIIRVCKGILEYLTVA

SEQ ID NO: 4131 - protein, 12 aa, Artificial
  helical interface sequence
VPKSFFDDARSA

SEQ ID NO: 4132 - protein, 12 aa, Artificial
  helical interface sequence
DDIVFEDFARQR

SEQ ID NO: 4133 - protein, 6 aa, Artificial
  helical interface sequence
ADIAVF

SEQ ID NO: 4134 - protein, 14 aa, Artificial
  helical interface sequence
APIREMVCFVLEQN

SEQ ID NO: 4135 - protein, 27 aa, Artificial
  helical interface sequence
PFHGLSIAFLYGSALLFAMHGATILAV

SEQ ID NO: 4136 - protein, 16 aa, Artificial
  helical interface sequence
TNLRYLALESMCTLAS

SEQ ID NO: 4137 - protein, 18 aa, Artificial
  helical interface sequence
NQHLCGSHLVEALYLVCG

SEQ ID NO: 4138 - protein, 18 aa, Artificial
  helical interface sequence
EDGYYFTNLCCAVAFIEK

SEQ ID NO: 4139 - protein, 5 aa, Artificial
  helical interface sequence
RQWQS

SEQ ID NO: 4140 - protein, 15 aa, Artificial
  helical interface sequence
AEFAAASVQRYELNM

SEQ ID NO: 4141 - protein, 19 aa, Artificial
  helical interface sequence
PEIHLSVDKFLQQLALALA

SEQ ID NO: 4142 - protein, 14 aa, Artificial
  helical interface sequence
LHDLVDYYYFWKED

SEQ ID NO: 4143 - protein, 6 aa, Artificial
  helical interface sequence
PPCILN

SEQ ID NO: 4144 - protein, 5 aa, Artificial
  helical interface sequence
DPAYY

SEQ ID NO: 4145 - protein, 8 aa, Artificial
  helical interface sequence
ITEYRKRH

SEQ ID NO: 4146 - protein, 51 aa, Artificial
  helical interface sequence
LKDITRRLKSIKNIQKITKSMKMVAAAKYARAERELKPARVYGVGSLALYE

SEQ ID NO: 4147 - protein, 16 aa, Artificial
  helical interface sequence
VEELFEWFQSIREITW

SEQ ID NO: 4148 - protein, 8 aa, Artificial
  helical interface sequence
AMLLKDRL

SEQ ID NO: 4149 - protein, 11 aa, Artificial
  helical interface sequence
VKHLLDAAARG

SEQ ID NO: 4150 - protein, 22 aa, Artificial
  helical interface sequence
AQGALANIAVDKANLEIMTKRS

SEQ ID NO: 4151 - protein, 22 aa, Artificial
  helical interface sequence
IPDGRHLVNRGREEAASFKKLY

SEQ ID NO: 4152 - protein, 11 aa, Artificial
  helical interface sequence
RFREQKFRLKR

SEQ ID NO: 4153 - protein, 11 aa, Artificial
  helical interface sequence
QRCCNLFEKFF

SEQ ID NO: 4154 - protein, 19 aa, Artificial
  helical interface sequence
EHTVSRLLRVMQCLSRIEE

SEQ ID NO: 4155 - protein, 24 aa, Artificial
  helical interface sequence
VRWVAVHTLAVPTIFFLGAIAAMQ

SEQ ID NO: 4156 - protein, 30 aa, Artificial; identical to SEQ ID NO: 1386
  helical interface sequence

SEQ ID NO: 4157 - protein, 18 aa, Artificial
  helical interface sequence
PYAAQLAALDAAKKAMAY

SEQ ID NO: 4158 - protein, 11 aa, Artificial
  helical interface sequence
RICLRELAHKG

SEQ ID NO: 4159 - protein, 11 aa, Artificial
  helical interface sequence
KSLSRVMIHVF

SEQ ID NO: 4160 - protein, 13 aa, Artificial
  helical interface sequence
YTIWIYRFNILKN

SEQ ID NO: 4161 - protein, 17 aa, Artificial
  helical interface sequence
AQVPLGAGIALACKYNG

SEQ ID NO: 4162 - protein, 13 aa, Artificial
  helical interface sequence
GQIFEAYNMAALW

SEQ ID NO: 4163 - protein, 14 aa, Artificial
  helical interface sequence
EMGFAGIAVGAAMA

SEQ ID NO: 4164 - protein, 15 aa, Artificial
  helical interface sequence
PVRVAEEACLLDQMS

SEQ ID NO: 4165 - protein, 16 aa, Artificial
  helical interface sequence
NYELISNELKARLLQE

SEQ ID NO: 4166 - protein, 5 aa, Artificial
  helical interface sequence
PWWET

SEQ ID NO: 4167 - protein, 10 aa, Artificial
  helical interface sequence
ELDELMASLS

SEQ ID NO: 4168 - protein, 19 aa, Artificial
  helical interface sequence
YLKAQKVRRLITNDFLKAF

SEQ ID NO: 4169 - protein, 14 aa, Artificial
  helical interface sequence
VGRQLAIIGDDINR

SEQ ID NO: 4170 - protein, 17 aa, Artificial
  helical interface sequence
EAETKSTLMFGQRAKTI

SEQ ID NO: 4171 - protein, 22 aa, Artificial
  helical interface sequence
KDVLAALIPKEQARIKTFRQQH

SEQ ID NO: 4172 - protein, 11 aa, Artificial
  helical interface sequence
MMDVKRALEDA

SEQ ID NO: 4173 - protein, 13 aa, Artificial
  helical interface sequence
TVALREIRRYQKS

SEQ ID NO: 4174 - protein, 12 aa, Artificial
  helical interface sequence
PLTEAVAAADSQ

SEQ ID NO: 4175 - protein, 9 aa, Artificial
  helical interface sequence
DEENDMLDL

SEQ ID NO: 4176 - protein, 5 aa, Artificial
  helical interface sequence
DRLRP

SEQ ID NO: 4177 - protein, 13 aa, Artificial
  helical interface sequence
ASLIMPFLDNQVN

SEQ ID NO: 4178 - protein, 15 aa, Artificial
  helical interface sequence
DKKLAKLIDEVETLF

SEQ ID NO: 4179 - protein, 16 aa, Artificial
  helical interface sequence
QGCVAYFRSYFNRHFR

SEQ ID NO: 4180 - protein, 8 aa, Artificial
  helical interface sequence
EVERWVDK

SEQ ID NO: 4181 - protein, 25 aa, Artificial
  helical interface sequence
SRRMAACLRDMEIILRYVTYAVFAG

SEQ ID NO: 4182 - protein, 17 aa, Artificial
  helical interface sequence
EKDKLKMEVDQLKKEVT

SEQ ID NO: 4183 - protein, 22 aa, Artificial
  helical interface sequence
PQGGLQNIATGKHNLEILTKRS

SEQ ID NO: 4184 - protein, 13 aa, Artificial
  helical interface sequence
VFIGRLIEHMQEY

SEQ ID NO: 4185 - protein, 10 aa, Artificial
  helical interface sequence
VSQALLWACQ

SEQ ID NO: 4186 - protein, 10 aa, Artificial
  helical interface sequence
YETFKSIMKK

SEQ ID NO: 4187 - protein, 29 aa, Artificial
  helical interface sequence
LFAKLLQKMTDLRQIVTEHVQLLQVIKKT

SEQ ID NO: 4188 - protein, 32 aa, Artificial; identical to SEQ ID NO: 1402
  helical interface sequence

SEQ ID NO: 4189 - protein, 7 aa, Artificial
  helical interface sequence
LRPLSYP

SEQ ID NO: 4190 - protein, 27 aa, Artificial
  helical interface sequence
IYEETRGVLKVFLENVIRDAVTYTEHA

SEQ ID NO: 4191 - protein, 18 aa, Artificial
  helical interface sequence
YREYGRRLVMSIRRSALM

SEQ ID NO: 4192 - protein, 17 aa, Artificial
  helical interface sequence
SHVLSKVCMYFTYKVRY

SEQ ID NO: 4193 - protein, 11 aa, Artificial
  helical interface sequence
EEVDEMIREAD

SEQ ID NO: 4194 - protein, 10 aa, Artificial
  helical interface sequence
YEEFVQMMTA

SEQ ID NO: 4195 - protein, 11 aa, Artificial
  helical interface sequence
TEDFVKAFQVF

SEQ ID NO: 4196 - protein, 13 aa, Artificial
  helical interface sequence
KEYWRYIGRSLQS

SEQ ID NO: 4197 - protein, 13 aa, Artificial
  helical interface sequence
KEYWRYIGRSLQS

SEQ ID NO: 4198 - protein, 14 aa, Artificial
  helical interface sequence
YTVWHFRRVLLRSL

SEQ ID NO: 4199 - protein, 17 aa, Artificial
  helical interface sequence
DILGALLLILALMLLVL

SEQ ID NO: 4200 - protein, 9 aa, Artificial
  helical interface sequence
YEEFVQMMT

SEQ ID NO: 4201 - protein, 25 aa, Artificial
  helical interface sequence
VAGVRDHFRIAALWWHQMIHKIIRV

SEQ ID NO: 4202 - protein, 7 aa, Artificial
  helical interface sequence
RPIADAG

SEQ ID NO: 4203 - protein, 23 aa, Artificial
  helical interface sequence
PWPLTGALSALLMTSGLTMWFHF

SEQ ID NO: 4204 - protein, 26 aa, Artificial
  helical interface sequence
IESVHRWGWFFSLMVMVSASVGILLT

SEQ ID NO: 4205 - protein, 23 aa, Artificial
  helical interface sequence
AGIAIELVRLFAVELEHYEKIEG

SEQ ID NO: 4206 - protein, 28 aa, Artificial
  helical interface sequence
GWLIRSIHRWSASMMVLMMVLHVFRVYL

SEQ ID NO: 4207 - protein, 11 aa, Artificial
  helical interface sequence
TCSVTCKNVWT

SEQ ID NO: 4208 - protein, 24 aa, Artificial
  helical interface sequence
KPVLRALKRMLAMRHYKRAETVDG

SEQ ID NO: 4209 - protein, 18 aa, Artificial
  helical interface sequence
EEVIKRELTEKVKEAVSK

SEQ ID NO: 4210 - protein, 12 aa, Artificial
  helical interface sequence
NLFQALIDIQEF

SEQ ID NO: 4211 - protein, 24 aa, Artificial
  helical interface sequence
RTSLYLGLLLILVLALLFSSYFFN

SEQ ID NO: 4212 - protein, 12 aa, Artificial
  helical interface sequence
AVYVLSSMARQR

SEQ ID NO: 4213 - protein, 14 aa, Artificial
  helical interface sequence
YSWIINGIEWAISN

SEQ ID NO: 4214 - protein, 20 aa, Artificial
  helical interface sequence
SKLRGHAITLTYALNNFVDS

SEQ ID NO: 4215 - protein, 19 aa, Artificial
  helical interface sequence
SQQVAVGRQLEDFRSKRLM

SEQ ID NO: 4216 - protein, 13 aa, Artificial
  helical interface sequence
TSEVLKYTLFQIF

SEQ ID NO: 4217 - protein, 37 aa, Artificial; identical to SEQ ID NO: 288
  helical interface sequence

SEQ ID NO: 4218 - protein, 27 aa, Artificial
  helical interface sequence
IYEETRGVLKVFLENVIRDAVTYTEHA

SEQ ID NO: 4219 - protein, 15 aa, Artificial
  helical interface sequence
EEMKEEYRQQTLRTF

SEQ ID NO: 4220 - protein, 15 aa, Artificial
  helical interface sequence
EEMKEEYRQQTLRTF

SEQ ID NO: 4221 - protein, 18 aa, Artificial
  helical interface sequence
SHVLSKVCMYFTYKVRYT

SEQ ID NO: 4222 - protein, 8 aa, Artificial
  helical interface sequence
ERELLESY

SEQ ID NO: 4223 - protein, 16 aa, Artificial
  helical interface sequence
YEAVGGATLARCLIVY

SEQ ID NO: 4224 - protein, 12 aa, Artificial
  helical interface sequence
FQVEYAREAVKK

SEQ ID NO: 4225 - protein, 10 aa, Artificial
  helical interface sequence
EMEVWALEAY

SEQ ID NO: 4226 - protein, 6 aa, Artificial
  helical interface sequence
NHVKKF

SEQ ID NO: 4227 - protein, 12 aa, Artificial
  helical interface sequence
AANAKQLYDFIH

SEQ ID NO: 4228 - protein, 13 aa, Artificial
  helical interface sequence
EALGEFIFDKKLL

SEQ ID NO: 4229 - protein, 16 aa, Artificial
  helical interface sequence
LSLALYVFDEYLQKTV

SEQ ID NO: 4230 - protein, 15 aa, Artificial
  helical interface sequence
INSAARNIQHLLYGK

SEQ ID NO: 4231 - protein, 27 aa, Artificial
  helical interface sequence
IYEETRGVLKVFLENVIRDAVTYTEHA

SEQ ID NO: 4232 - protein, 7 aa, Artificial
  helical interface sequence
LLQQLLT

SEQ ID NO: 4233 - protein, 23 aa, Artificial
  helical interface sequence
TVLSSSIAAVFFAAFVVAGTMWY

SEQ ID NO: 4234 - protein, 16 aa, Artificial
  helical interface sequence
YHEDIHTYLREMEVKC

SEQ ID NO: 4235 - protein, 16 aa, Artificial
  helical interface sequence
SIREEVHRHLGTVALM

SEQ ID NO: 4236 - protein, 17 aa, Artificial
  helical interface sequence
LTELHNKIVEMRERVAS

SEQ ID NO: 4237 - protein, 16 aa, Artificial
  helical interface sequence
YYGRWLLTAARILVDK

SEQ ID NO: 4238 - protein, 18 aa, Artificial
  helical interface sequence
LTELHNKIVEMRERVASG

SEQ ID NO: 4239 - protein, 10 aa, Artificial
  helical interface sequence
PAARNILEKH

SEQ ID NO: 4240 - protein, 28 aa, Artificial
  helical interface sequence
DTPIKVANTGLYVLSAITFTGLCYFNYY

SEQ ID NO: 4241 - protein, 23 aa, Artificial
  helical interface sequence
AAVAVEFARLYAVELEHYEKLEG

SEQ ID NO: 4242 - protein, 17 aa, Artificial
  helical interface sequence
SHVLSKVCMYFTYKVRY

SEQ ID NO: 4243 - protein, 10 aa, Artificial
  helical interface sequence
VIYHFKHYTE

SEQ ID NO: 4244 - protein, 15 aa, Artificial
  helical interface sequence
PATKSMIQREAIRTF

SEQ ID NO: 4245 - protein, 14 aa, Artificial
  helical interface sequence
PLDVVELVVRELEN

SEQ ID NO: 4246 - protein, 19 aa, Artificial
  helical interface sequence
RTNKITTSISHVESLLDDR

SEQ ID NO: 4247 - protein, 18 aa, Artificial
  helical interface sequence
PFLATKINEAKDFLEKRG

SEQ ID NO: 4248 - protein, 15 aa, Artificial
  helical interface sequence
PADILPLITLRLNIY

SEQ ID NO: 4249 - protein, 14 aa, Artificial
  helical interface sequence
RHILRWIDYMQNLL

SEQ ID NO: 4250 - protein, 11 aa, Artificial
  helical interface sequence
TVEYFTSQQVT

SEQ ID NO: 4251 - protein, 20 aa, Artificial
  helical interface sequence
EEDTGVTNRDLISRRIKEYN

SEQ ID NO: 4252 - protein, 5 aa, Artificial
  helical interface sequence
AWYCS

SEQ ID NO: 4253 - protein, 15 aa, Artificial
  helical interface sequence
IFSHLDWTNNFSLVH

SEQ ID NO: 4254 - protein, 15 aa, Artificial
  helical interface sequence
QELVQQVLSLATQDS

SEQ ID NO: 4255 - protein, 11 aa, Artificial
  helical interface sequence
IGIDNLRNFYT

SEQ ID NO: 4256 - protein, 14 aa, Artificial
  helical interface sequence
FEDFVTALSILLRG

SEQ ID NO: 4257 - protein, 19 aa, Artificial
  helical interface sequence
VNQHLCGSHLVEALYLVCG

SEQ ID NO: 4258 - protein, 6 aa, Artificial
  helical interface sequence
RQWQSL

SEQ ID NO: 4259 - protein, 29 aa, Artificial
  helical interface sequence
GFMLRYLHANGASLFFIAVYLHIFRGLYY

SEQ ID NO: 4260 - protein, 32 aa, Artificial
  helical interface sequence
QKKKALERSMYVLSELVETEKMYVDDLGQIVE

SEQ ID NO: 4261 - protein, 25 aa, Artificial
  helical interface sequence
RTAIEAFNETIKIFEEQCQTQERYS

SEQ ID NO: 4262 - protein, 18 aa, Artificial
  helical interface sequence
SEEVDVERLVNQGLKRVG

SEQ ID NO: 4263 - protein, 12 aa, Artificial
  helical interface sequence
VGPALLQIFKDG

SEQ ID NO: 4264 - protein, 15 aa, Artificial
  helical interface sequence
VKEVMHYLGQYIMVK

SEQ ID NO: 4265 - protein, 15 aa, Artificial
  helical interface sequence
ALDVVTEAVRLLEEC

SEQ ID NO: 4266 - protein, 10 aa, Artificial
  helical interface sequence
LALVWRRQIQ

SEQ ID NO: 4267 - protein, 6 aa, Artificial
  helical interface sequence
YNAIAF

SEQ ID NO: 4268 - protein, 22 aa, Artificial
  helical interface sequence
LVDVSKIITLTQEFRRHYDSVY

SEQ ID NO: 4269 - protein, 16 aa, Artificial
  helical interface sequence
GNSVAPAALFLAAKVE

SEQ ID NO: 4270 - protein, 18 aa, Artificial
  helical interface sequence
VSGTLIGLEFIRKSQLVQ

SEQ ID NO: 4271 - protein, 23 aa, Artificial
  helical interface sequence
VADARVLVDFARISAQQEKVTYG

SEQ ID NO: 4272 - protein, 53 aa, Artificial
  helical interface sequence
HSVQVDQLRMQGQSVEAALRMERQAASEEKRKLAQLQVAYHQLFQEYDNHIKS

SEQ ID NO: 4273 - protein, 20 aa, Artificial
  helical interface sequence
GLRQLANETTQALQLFLRAT

SEQ ID NO: 4274 - protein, 11 aa, Artificial
  helical interface sequence
PGLRNDLAVLA

SEQ ID NO: 4275 - protein, 15 aa, Artificial
  helical interface sequence
PGWQGLRELMEKQLT

SEQ ID NO: 4276 - protein, 16 aa, Artificial
  helical interface sequence
VADCGAEALARLLIVY

SEQ ID NO: 4277 - protein, 24 aa, Artificial
  helical interface sequence
IEFRRTLTLSFFFKFYLTVLKKLG

SEQ ID NO: 4278 - protein, 17 aa, Artificial
  helical interface sequence
AQVPLGAGIALACKYNG

SEQ ID NO: 4279 - protein, 14 aa, Artificial
  helical interface sequence
WKFLKTVVNKLFEF

SEQ ID NO: 4280 - protein, 40 aa, Artificial; identical to SEQ ID NO: 1389
  helical interface sequence

SEQ ID NO: 4281 - protein, 21 aa, Artificial
  helical interface sequence
EMVRLKKLVAYWKEQAGKKGE

SEQ ID NO: 4282 - protein, 17 aa, Artificial
  helical interface sequence
KYERARILGTRALQISM

SEQ ID NO: 4283 - protein, 10 aa, Artificial
  helical interface sequence
VEILFEAGAS

SEQ ID NO: 4284 - protein, 12 aa, Artificial
  helical interface sequence
AITSVINSSDVQ

SEQ ID NO: 4285 - protein, 10 aa, Artificial
  helical interface sequence
LLVQRTIART

SEQ ID NO: 4286 - protein, 21 aa, Artificial
  helical interface sequence
TDVIIAFQAQCRGYLARKAFA

SEQ ID NO: 4287 - protein, 24 aa, Artificial
  helical interface sequence
DILEQARAAVDTYCRHNYGVVESF

SEQ ID NO: 4288 - protein, 14 aa, Artificial
  helical interface sequence
YHAWQHRQWVIQEF

SEQ ID NO: 4289 - protein, 8 aa, Artificial
  helical interface sequence
QMQHWKEQ

SEQ ID NO: 4290 - protein, 14 aa, Artificial
  helical interface sequence
QAKSAILHIKETKY

SEQ ID NO: 4291 - protein, 23 aa, Artificial
  helical interface sequence
PAEVEALREKVYASLEAYCKHKY

SEQ ID NO: 4292 - protein, 6 aa, Artificial
  helical interface sequence
PAVRYA

SEQ ID NO: 4293 - protein, 7 aa, Artificial
  helical interface sequence
REFLLDF

SEQ ID NO: 4294 - protein, 29 aa, Artificial
  helical interface sequence
GLIYEETRGVLKVFLENVIRDAVTYTEHA

SEQ ID NO: 4295 - protein, 22 aa, Artificial
  helical interface sequence
PMIIEGQIHGGLTEGYAVAMGQ

SEQ ID NO: 4296 - protein, 15 aa, Artificial
  helical interface sequence
QGTLFELILAANYLD

SEQ ID NO: 4297 - protein, 32 aa, Artificial; identical to SEQ ID NO: 825
  helical interface sequence

SEQ ID NO: 4298 - protein, 47 aa, Artificial; identical to SEQ ID NO: 1689
  helical interface sequence

SEQ ID NO: 4299 - protein, 12 aa, Artificial
  helical interface sequence
AFTKVVSQADTR

SEQ ID NO: 4300 - protein, 22 aa, Artificial
  helical interface sequence
ADAELQRLKNERHEEAELERLK

SEQ ID NO: 4301 - protein, 11 aa, Artificial
  helical interface sequence
IYEEVRAVLKS

SEQ ID NO: 4302 - protein, 30 aa, Artificial
  helical interface sequence
LETDLYKRFILVLNEKKTKIRSLHNKLLNA

SEQ ID NO: 4303 - protein, 14 aa, Artificial
  helical interface sequence
DEQIAAQVDYIVAN

SEQ ID NO: 4304 - protein, 20 aa, Artificial
  helical interface sequence
WRDRFLFVAEAIYKAQAETG

SEQ ID NO: 4305 - protein, 22 aa, Artificial
  helical interface sequence
PQGGLQNIAVVKHNLGVLTKRS

SEQ ID NO: 4306 - protein, 11 aa, Artificial
  helical interface sequence
EEQIYELFSKS

SEQ ID NO: 4307 - protein, 18 aa, Artificial
  helical interface sequence
DMKRLEVDIDIKIRSCRG

SEQ ID NO: 4308 - protein, 15 aa, Artificial
  helical interface sequence
EEASKLKERIWIGLN

SEQ ID NO: 4309 - protein, 8 aa, Artificial
  helical interface sequence
ERELLESY

SEQ ID NO: 4310 - protein, 13 aa, Artificial
  helical interface sequence
PWWAAFSRVCKDM

SEQ ID NO: 4311 - protein, 27 aa, Artificial
  helical interface sequence
PLLCGIVLGLVPVTIAGLFVTAYLQYL

SEQ ID NO: 4312 - protein, 25 aa, Artificial
  helical interface sequence
TKPVLRALKRMLAMRHYKRAETVDG

SEQ ID NO: 4313 - protein, 21 aa, Artificial
  helical interface sequence
HTIAAFLGGAAAQEVIKIITK

SEQ ID NO: 4314 - protein, 23 aa, Artificial
  helical interface sequence
AQGALANIAVDKANLDVMKERSN

SEQ ID NO: 4315 - protein, 22 aa, Artificial
  helical interface sequence
NADSRILIEKARVEAQSHRLTL

SEQ ID NO: 4316 - protein, 12 aa, Artificial
  helical interface sequence
FQVEYALEAIKQ

SEQ ID NO: 4317 - protein, 12 aa, Artificial
  helical interface sequence
FFGHIWHGARTL

SEQ ID NO: 4318 - protein, 42 aa, Artificial
  helical interface sequence
QALSEIETRHSEIIKLENSIRELHDMFMDMAMLVESQGEMID

SEQ ID NO: 4319 - protein, 47 aa, Artificial
  helical interface sequence
IGNLRHMALDMGNEIDTQNRQIDRIMEKADSNKTRIDEANQRATKML

SEQ ID NO: 4320 - protein, 23 aa, Artificial
  helical interface sequence
TEELLDFLHARDHCVAHKLFNSL

SEQ ID NO: 4321 - protein, 16 aa, Artificial
  helical interface sequence
QRLVQNCLWTLRNLSD

SEQ ID NO: 4322 - protein, 6 aa, Artificial
  helical interface sequence
VLTKRS

SEQ ID NO: 4323 - protein, 23 aa, Artificial
  helical interface sequence
VLRKAIDYIKYLQQVNHKLRQEN

SEQ ID NO: 4324 - protein, 24 aa, Artificial
  helical interface sequence
ARTWRFLTFGLALPSVALCTLNSW

SEQ ID NO: 4325 - protein, 32 aa, Artificial; identical to SEQ ID NO: 1282
  helical interface sequence

SEQ ID NO: 4326 - protein, 18 aa, Artificial
  helical interface sequence
SHVLSKVCMYFTYKVRYT

SEQ ID NO: 4327 - protein, 22 aa, Artificial
  helical interface sequence
LAFGTVTGVALGALYPLVKYFI

SEQ ID NO: 4328 - protein, 5 aa, Artificial
  helical interface sequence
ITDYF

SEQ ID NO: 4329 - protein, 24 aa, Artificial
  helical interface sequence
TVNDFYYEVCLKVIEICRQTKDMN

SEQ ID NO: 4330 - protein, 12 aa, Artificial
  helical interface sequence
FAQASIDSYKKH

SEQ ID NO: 4331 - protein, 13 aa, Artificial
  helical interface sequence
FHRRELWEAIEAG

SEQ ID NO: 4332 - protein, 7 aa, Artificial
  helical interface sequence
FFAENEQ

SEQ ID NO: 4333 - protein, 12 aa, Artificial
  helical interface sequence
FILREKITHFDH

SEQ ID NO: 4334 - protein, 16 aa, Artificial
  helical interface sequence
LSLALYVFDEYLQKTV

SEQ ID NO: 4335 - protein, 28 aa, Artificial
  helical interface sequence
DALQKAAKAGLLALSAFTFAGLCYFNYH

SEQ ID NO: 4336 - protein, 14 aa, Artificial
  helical interface sequence
VVGPATLARCLVVY

SEQ ID NO: 4337 - protein, 13 aa, Artificial
  helical interface sequence
IGDALGFAVRYLT

SEQ ID NO: 4338 - protein, 15 aa, Artificial
  helical interface sequence
DKKLAKLIDEVETLF

SEQ ID NO: 4339 - protein, 20 aa, Artificial
  helical interface sequence
TTEAFEKMVSLLSVLLSMQG

SEQ ID NO: 4340 - protein, 7 aa, Artificial
  helical interface sequence
EAEISHT

SEQ ID NO: 4341 - protein, 23 aa, Artificial
  helical interface sequence
FAEALRIGSEVYHNLKSLTKKRY

SEQ ID NO: 4342 - protein, 9 aa, Artificial
  helical interface sequence
LGTSKINYI

SEQ ID NO: 4343 - protein, 17 aa, Artificial
  helical interface sequence
ENSIELARVVDRGIRES

SEQ ID NO: 4344 - protein, 11 aa, Artificial
  helical interface sequence
YESFVDMLVTG

SEQ ID NO: 4345 - protein, 26 aa, Artificial
  helical interface sequence
LQDIDQAENTARSTAVKLLEELKKHL

SEQ ID NO: 4346 - protein, 17 aa, Artificial
  helical interface sequence
PATYNGFLEIMKEFKSQ

SEQ ID NO: 4347 - protein, 16 aa, Artificial
  helical interface sequence
SIREEVHRHLGTVALM

SEQ ID NO: 4348 - protein, 15 aa, Artificial
  helical interface sequence
KEVKRRIFLGTFALS

SEQ ID NO: 4349 - protein, 10 aa, Artificial
  helical interface sequence
PAYRARVVKE

SEQ ID NO: 4350 - protein, 18 aa, Artificial
  helical interface sequence
LTELHNKIVEMRERVASG

SEQ ID NO: 4351 - protein, 18 aa, Artificial
  helical interface sequence
LTELHNKIVEMRERVASG

SEQ ID NO: 4352 - protein, 22 aa, Artificial
  helical interface sequence
FNEFDNLRRGGIQFADTRGYAY

SEQ ID NO: 4353 - protein, 10 aa, Artificial
  helical interface sequence
RPDAEYWNSQ

SEQ ID NO: 4354 - protein, 20 aa, Artificial
  helical interface sequence
QAQETQGQAAARAAAADLAA

SEQ ID NO: 4355 - protein, 18 aa, Artificial
  helical interface sequence
PFLATKINEAKDFLEKRG

SEQ ID NO: 4356 - protein, 50 aa, Artificial; identical to SEQ ID NO: 225
  helical interface sequence

SEQ ID NO: 4357 - protein, 10 aa, Artificial
  helical interface sequence
KVRLVVDLIR

SEQ ID NO: 4358 - protein, 12 aa, Artificial
  helical interface sequence
VFYLHSRLLERA

SEQ ID NO: 4359 - protein, 14 aa, Artificial
  helical interface sequence
HSVQVALKYVAATG

SEQ ID NO: 4360 - protein, 16 aa, Artificial
  helical interface sequence
LTELLQGYTVEVLRQQ

SEQ ID NO: 4361 - protein, 20 aa, Artificial
  helical interface sequence
EDESYARAYRIIRAHQTELT

SEQ ID NO: 4362 - protein, 10 aa, Artificial
  helical interface sequence
LSQISSTFYF

SEQ ID NO: 4363 - protein, 17 aa, Artificial
  helical interface sequence
IEYLAKQIVDNAIQQAK

SEQ ID NO: 4364 - protein, 14 aa, Artificial
  helical interface sequence
KGFKEQIYDVYRYL

SEQ ID NO: 4365 - protein, 20 aa, Artificial
  helical interface sequence
PREWDKTYWEGKKVLQNLLD

SEQ ID NO: 4366 - protein, 5 aa, Artificial
  helical interface sequence
ERKYR

SEQ ID NO: 4367 - protein, 23 aa, Artificial
  helical interface sequence
EESYKDSTLIMQLLRDNLTLWTS

SEQ ID NO: 4368 - protein, 18 aa, Artificial
  helical interface sequence
NQHLCGSHLVEALYLVCG

SEQ ID NO: 4369 - protein, 18 aa, Artificial
  helical interface sequence
NQHLCGSHLVEALYLVCG

SEQ ID NO: 4370 - protein, 18 aa, Artificial
  helical interface sequence
NQHLCGSHLVEALYLVCG

SEQ ID NO: 4371 - protein, 7 aa, Artificial
  helical interface sequence
RQWQSLI

SEQ ID NO: 4372 - protein, 34 aa, Artificial
  helical interface sequence
MQESIARFHEIIAIDKNHLRAVEQAIEQTMHSLN

SEQ ID NO: 4373 - protein, 16 aa, Artificial
  helical interface sequence
TDKDAEALFKCFRSLG

SEQ ID NO: 4374 - protein, 16 aa, Artificial
  helical interface sequence
VEEVGGEALGRLLVVY

SEQ ID NO: 4375 - protein, 19 aa, Artificial
  helical interface sequence
LGEFLKLDRERAKNKIAKE

SEQ ID NO: 4376 - protein, 6 aa, Artificial
  helical interface sequence
YFYSKF

SEQ ID NO: 4377 - protein, 23 aa, Artificial
  helical interface sequence
KDLLEQKRAAVDTYCRHNYGVGE

SEQ ID NO: 4378 - protein, 27 aa, Artificial
  helical interface sequence
STEIQVAFGRFRQAAAGLSAATALTSA

SEQ ID NO: 4379 - protein, 12 aa, Artificial
  helical interface sequence
RKFISDYLWSLV

SEQ ID NO: 4380 - protein, 17 aa, Artificial
  helical interface sequence
DDEKQKLIEEVHAVVTV

SEQ ID NO: 4381 - protein, 12 aa, Artificial
  helical interface sequence
LATRRAFLKKKG

SEQ ID NO: 4382 - protein, 13 aa, Artificial
  helical interface sequence
NLLQRTYDYLNSV

SEQ ID NO: 4383 - protein, 15 aa, Artificial
  helical interface sequence
ALDVVTEAVRLLEEC

SEQ ID NO: 4384 - protein, 16 aa, Artificial
  helical interface sequence
DTVIEDIIDKTFEEAD

SEQ ID NO: 4385 - protein, 19 aa, Artificial
  helical interface sequence
VGDFYYELGVQIIEVCLAL

SEQ ID NO: 4386 - protein, 10 aa, Artificial
  helical interface sequence
EELFNVQDQH

SEQ ID NO: 4387 - protein, 31 aa, Artificial
  helical interface sequence
MGRRQFMNLLTFGTVTGVALGALYPVVNYFI

SEQ ID NO: 4388 - protein, 19 aa, Artificial
  helical interface sequence
LSAMAFLFQEMISQLHRTC

SEQ ID NO: 4389 - protein, 19 aa, Artificial
  helical interface sequence
LSAMAFLFQEMISQLHRTC

SEQ ID NO: 4390 - protein, 16 aa, Artificial
  helical interface sequence
AQYIQAAGVALGLKMR

SEQ ID NO: 4391 - protein, 14 aa, Artificial
  helical interface sequence
ESGIGGLAIGLALQ

SEQ ID NO: 4392 - protein, 9 aa, Artificial
  helical interface sequence
QMARIRYRT

SEQ ID NO: 4393 - protein, 30 aa, Artificial; identical to SEQ ID NO: 3398
  helical interface sequence

SEQ ID NO: 4394 - protein, 15 aa, Artificial
  helical interface sequence
IDQVINSAAKTYYMS

SEQ ID NO: 4395 - protein, 13 aa, Artificial
  helical interface sequence
GQIFEAYNMAALW

SEQ ID NO: 4396 - protein, 6 aa, Artificial
  helical interface sequence
KILEDN

SEQ ID NO: 4397 - protein, 15 aa, Artificial
  helical interface sequence
TREGNDLYREMKETG

SEQ ID NO: 4398 - protein, 10 aa, Artificial
  helical interface sequence
YEELKHLLSR

SEQ ID NO: 4399 - protein, 29 aa, Artificial
  helical interface sequence
DLQSLEDILHQVENKTSEVKQLIKAIQLT

SEQ ID NO: 4400 - protein, 15 aa, Artificial
  helical interface sequence
PEVKRRIMLGTFALS

SEQ ID NO: 4401 - protein, 17 aa, Artificial
  helical interface sequence
LLDLHIELNGYMYDWNS

SEQ ID NO: 4402 - protein, 47 aa, Artificial
  helical interface sequence
HMARENEMDENLEQVSGIIGNLRHMALDMGNEIDTQNRQIDRIMEKA

SEQ ID NO: 4403 - protein, 7 aa, Artificial
  helical interface sequence
PQIRNLG

SEQ ID NO: 4404 - protein, 12 aa, Artificial
  helical interface sequence
AIYVYKVLKQVH

SEQ ID NO: 4405 - protein, 8 aa, Artificial
  helical interface sequence
IRETMKEK

SEQ ID NO: 4406 - protein, 8 aa, Artificial
  helical interface sequence
PNRVTLIN

SEQ ID NO: 4407 - protein, 20 aa, Artificial
  helical interface sequence
ENLYDDRMFRIKRALDLNMR

SEQ ID NO: 4408 - protein, 11 aa, Artificial
  helical interface sequence
WTTVILVKSML

SEQ ID NO: 4409 - protein, 14 aa, Artificial
  helical interface sequence
KEYWRYIGRSLQSK

SEQ ID NO: 4410 - protein, 5 aa, Artificial
  helical interface sequence
EYWNK

SEQ ID NO: 4411 - protein, 16 aa, Artificial
  helical interface sequence
VSELAELVKKLEDKFG

SEQ ID NO: 4412 - protein, 17 aa, Artificial
  helical interface sequence
KICAAFVREAATLYVER

SEQ ID NO: 4413 - protein, 12 aa, Artificial
  helical interface sequence
LQYMKNVFKEKY

SEQ ID NO: 4414 - protein, 17 aa, Artificial
  helical interface sequence
VKKIEKFHSQLMRLMVA

SEQ ID NO: 4415 - protein, 10 aa, Artificial
  helical interface sequence
VEDFWALYNH

SEQ ID NO: 4416 - protein, 10 aa, Artificial
  helical interface sequence
SFFYTNLSER

SEQ ID NO: 4417 - protein, 29 aa, Artificial
  helical interface sequence
GLWQIITICAAGAFISWALREVEICRKLG

SEQ ID NO: 4418 - protein, 31 aa, Artificial
  helical interface sequence
TALTNELIHLLGHSRHDWMNKLQLIKGNLSL

SEQ ID NO: 4419 - protein, 43 aa, Artificial; identical to SEQ ID NO: 967
  helical interface sequence

SEQ ID NO: 4420 - protein, 19 aa, Artificial
  helical interface sequence
CDVLAKRMANLSQIYTQRA

SEQ ID NO: 4421 - protein, 8 aa, Artificial
  helical interface sequence
KRWYRLAS

SEQ ID NO: 4422 - protein, 18 aa, Artificial
  helical interface sequence
CDVLAKRMANLSQIYTQR

SEQ ID NO: 4423 - protein, 30 aa, Artificial; identical to SEQ ID NO: 567
  helical interface sequence

SEQ ID NO: 4424 - protein, 17 aa, Artificial
  helical interface sequence
LSTIREVAVLRHLETFE

SEQ ID NO: 4425 - protein, 16 aa, Artificial
  helical interface sequence
PEAYGAECLARLFVTH

SEQ ID NO: 4426 - protein, 27 aa, Artificial
  helical interface sequence
STEIQVAFGRFRQAKAGLEAAKALTSK

SEQ ID NO: 4427 - protein, 12 aa, Artificial
  helical interface sequence
AFTKVVSQADTR

SEQ ID NO: 4428 - protein, 43 aa, Artificial
  helical interface sequence
MKQIEDKIEEIESKQKKIENEIARIKKLLQLTVWGIKQLQARI

SEQ ID NO: 4429 - protein, 44 aa, Artificial
  helical interface sequence
MKQIEDKIEEIESKQKKIENEIARIKKLLQLTVWGIKQLQARIL

SEQ ID NO: 4430 - protein, 30 aa, Artificial
  helical interface sequence
PAYASQTREAILSAVYSKNKDQCCNLLISK

SEQ ID NO: 4431 - protein, 7 aa, Artificial
  helical interface sequence
PALLEDQ

SEQ ID NO: 4432 - protein, 13 aa, Artificial
  helical interface sequence
VRAKWYPEVRHHC

SEQ ID NO: 4433 - protein, 13 aa, Artificial
  helical interface sequence
RYIEQEVRRSLQQ

SEQ ID NO: 4434 - protein, 14 aa, Artificial
  helical interface sequence
KLPFQRLVREIAQD

SEQ ID NO: 4435 - protein, 12 aa, Artificial
  helical interface sequence
FQVEYDIEAIKL

SEQ ID NO: 4436 - protein, 32 aa, Artificial; identical to SEQ ID NO: 1402
  helical interface sequence

SEQ ID NO: 4437 - protein, 9 aa, Artificial
  helical interface sequence
LISWLCFSV

SEQ ID NO: 4438 - protein, 7 aa, Artificial
  helical interface sequence
DRLRPLS

SEQ ID NO: 4439 - protein, 29 aa, Artificial
  helical interface sequence
PAHMIAISFFFTNALALALHGALVLSAAN

SEQ ID NO: 4440 - protein, 33 aa, Artificial; identical to SEQ ID NO: 2732
  helical interface sequence

SEQ ID NO: 4441 - protein, 11 aa, Artificial
  helical interface sequence
EEIREAFRVFD

SEQ ID NO: 4442 - protein, 20 aa, Artificial
  helical interface sequence
VNYFLDGERQLGTRLMELRN

SEQ ID NO: 4443 - protein, 9 aa, Artificial
  helical interface sequence
LARIKKIMK

SEQ ID NO: 4444 - protein, 8 aa, Artificial
  helical interface sequence
KILHRLLQ

SEQ ID NO: 4445 - protein, 16 aa, Artificial
  helical interface sequence
EDMIVDVALDLLAAHK

SEQ ID NO: 4446 - protein, 9 aa, Artificial
  helical interface sequence
MPNSWISMW

SEQ ID NO: 4447 - protein, 11 aa, Artificial
  helical interface sequence
STGISVASYLN

SEQ ID NO: 4448 - protein, 35 aa, Artificial; identical to SEQ ID NO: 2532
  helical interface sequence

SEQ ID NO: 4449 - protein, 28 aa, Artificial
  helical interface sequence
LTQQAYFMLATMTIAVPTGIKVFSWIAT

SEQ ID NO: 4450 - protein, 19 aa, Artificial
  helical interface sequence
PDVQAAFQKVVAGVANALA

SEQ ID NO: 4451 - protein, 21 aa, Artificial
  helical interface sequence
ASTNAVIAAVCATEVFKIATS

SEQ ID NO: 4452 - protein, 21 aa, Artificial
  helical interface sequence
NAPGAVANRVALEACVQARNE

SEQ ID NO: 4453 - protein, 23 aa, Artificial
  helical interface sequence
QKSTQNAIDGITNKVNSVIEKMN

SEQ ID NO: 4454 - protein, 37 aa, Artificial; identical to SEQ ID NO: 288
  helical interface sequence

SEQ ID NO: 4455 - protein, 20 aa, Artificial
  helical interface sequence
VPTAQLWGAVGAVGLVWATD

SEQ ID NO: 4456 - protein, 19 aa, Artificial
  helical interface sequence
TTNKSSIIEYSSVFDERLS

SEQ ID NO: 4457 - protein, 49 aa, Artificial
  helical interface sequence
VPARDYLIDGSRGILSGTSDLLLTFDEAEVRKIIRVCKGILEYLTVAEV

SEQ ID NO: 4458 - protein, 17 aa, Artificial
  helical interface sequence
ERTLEKLELERRYWQQK

SEQ ID NO: 4459 - protein, 15 aa, Artificial
  helical interface sequence
ALDVVTEAVRLLEEC

SEQ ID NO: 4460 - protein, 17 aa, Artificial
  helical interface sequence
EKDKLKMEVDQLKKEVT

SEQ ID NO: 4461 - protein, 14 aa, Artificial
  helical interface sequence
DEQIAAQVDYIVAN

SEQ ID NO: 4462 - protein, 15 aa, Artificial
  helical interface sequence
AKNYGRAVYECLRGG

SEQ ID NO: 4463 - protein, 14 aa, Artificial
  helical interface sequence
AKNYGRAVYECLRG

SEQ ID NO: 4464 - protein, 6 aa, Artificial
  helical interface sequence
INRWLF

SEQ ID NO: 4465 - protein, 24 aa, Artificial
  helical interface sequence
PLFNQILTLQQSIKQLKGQLNHIL

SEQ ID NO: 4466 - protein, 16 aa, Artificial
  helical interface sequence
SQSQEDISLLLQLVQN

SEQ ID NO: 4467 - protein, 9 aa, Artificial
  helical interface sequence
DKEWSRYLF

SEQ ID NO: 4468 - protein, 11 aa, Artificial
  helical interface sequence
FADYMEAFKTF

SEQ ID NO: 4469 - protein, 20 aa, Artificial
  helical interface sequence
FQEFLILVIKMGVAAHKKSH

SEQ ID NO: 4470 - protein, 9 aa, Artificial
  helical interface sequence
EKELFESYI

SEQ ID NO: 4471 - protein, 9 aa, Artificial
  helical interface sequence
DTFWDYVSL

SEQ ID NO: 4472 - protein, 5 aa, Artificial
  helical interface sequence
DRLRP

SEQ ID NO: 4473 - protein, 16 aa, Artificial
  helical interface sequence
LSLALYVFDEYLQKTV

SEQ ID NO: 4474 - protein, 5 aa, Artificial
  helical interface sequence
LESFF

SEQ ID NO: 4475 - protein, 12 aa, Artificial
  helical interface sequence
AIYVYKVLKQVH

SEQ ID NO: 4476 - protein, 12 aa, Artificial
  helical interface sequence
AIYVYKVLKQVH

SEQ ID NO: 4477 - protein, 15 aa, Artificial
  helical interface sequence
WKQNVSLSILKSHEN

SEQ ID NO: 4478 - protein, 11 aa, Artificial
  helical interface sequence
AAIRDNYFRSG

SEQ ID NO: 4479 - protein, 7 aa, Artificial
  helical interface sequence
PQTKIYF

SEQ ID NO: 4480 - protein, 10 aa, Artificial
  helical interface sequence
IKEKFIFQKM

SEQ ID NO: 4481 - protein, 16 aa, Artificial
  helical interface sequence
QDLRSHLVHKLVQAIF

SEQ ID NO: 4482 - protein, 12 aa, Artificial
  helical interface sequence
GEYRRRLKRELL

SEQ ID NO: 4483 - protein, 17 aa, Artificial
  helical interface sequence
SHVLSKVCMYFTYKVRY

SEQ ID NO: 4484 - protein, 12 aa, Artificial
  helical interface sequence
GGTQLSEWGKRL

SEQ ID NO: 4485 - protein, 16 aa, Artificial
  helical interface sequence
SIREEVHRHLGTVALM

SEQ ID NO: 4486 - protein, 7 aa, Artificial
  helical interface sequence
LIRELHR

SEQ ID NO: 4487 - protein, 22 aa, Artificial
  helical interface sequence
FNEFDNLRRGGIQFADTRGYAY

SEQ ID NO: 4488 - protein, 12 aa, Artificial
  helical interface sequence
YEDRREIRHIWD

SEQ ID NO: 4489 - protein, 19 aa, Artificial
  helical interface sequence
PEFGAHSQRVLSGLDITIS

SEQ ID NO: 4490 - protein, 14 aa, Artificial
  helical interface sequence
AIDELRHSQTQQHA

SEQ ID NO: 4491 - protein, 27 aa, Artificial
  helical interface sequence
PEGLRVFYYLVQDLKCLVFSLIGLHFK

SEQ ID NO: 4492 - protein, 8 aa, Artificial
  helical interface sequence
REWFKDML

SEQ ID NO: 4493 - protein, 17 aa, Artificial
  helical interface sequence
PVCKQLIALCCYHAKHC

SEQ ID NO: 4494 - protein, 9 aa, Artificial
  helical interface sequence
FYDECLRKY

SEQ ID NO: 4495 - protein, 34 aa, Artificial
  helical interface sequence
RRKEFIMAELIQTEKAYVRDLRECMDTYLWEMTS

SEQ ID NO: 4496 - protein, 29 aa, Artificial
  helical interface sequence
SKAMSIMNSFVNDVFERIAGEASRLAHYN

SEQ ID NO: 4497 - protein, 18 aa, Artificial
  helical interface sequence
NQHLCGSHLVEALYLVCG

SEQ ID NO: 4498 - protein, 5 aa, Artificial
  helical interface sequence
LRGFL

SEQ ID NO: 4499 - protein, 8 aa, Artificial
  helical interface sequence
PVYNTVAK

SEQ ID NO: 4500 - protein, 22 aa, Artificial
  helical interface sequence
AQGALANIAVDKANLEIMTKRS

SEQ ID NO: 4501 - protein, 22 aa, Artificial
  helical interface sequence
VERLCFQIEQAHWFYEDFIRAQ

SEQ ID NO: 4502 - protein, 14 aa, Artificial
  helical interface sequence
LDVMGEIYIALKNL

SEQ ID NO: 4503 - protein, 11 aa, Artificial
  helical interface sequence
VKTSLSLLTLN

SEQ ID NO: 4504 - protein, 7 aa, Artificial
  helical interface sequence
DFLNALQ

SEQ ID NO: 4505 - protein, 27 aa, Artificial
  helical interface sequence
STEIQVAFGRFRQAAAGLSAATALTSA

SEQ ID NO: 4506 - protein, 25 aa, Artificial
  helical interface sequence
QRGKDKCARDIGYYLRMVTYCLIAG

SEQ ID NO: 4507 - protein, 27 aa, Artificial
  helical interface sequence
STEIQVAFGRFRQAAAGLSAATALTSA

SEQ ID NO: 4508 - protein, 21 aa, Artificial
  helical interface sequence
MEGFLPFSNLVTHLDSFLPIC

SEQ ID NO: 4509 - protein, 13 aa, Artificial
  helical interface sequence
ALDFAGLKKYIMA

SEQ ID NO: 4510 - protein, 22 aa, Artificial
  helical interface sequence
WGRIVTIFAFGGVLLKKLKQEQ

SEQ ID NO: 4511 - protein, 10 aa, Artificial
  helical interface sequence
DDLDALLADL

SEQ ID NO: 4512 - protein, 22 aa, Artificial
  helical interface sequence
AQGALANIAVDKANLEIMTKRS

SEQ ID NO: 4513 - protein, 16 aa, Artificial
  helical interface sequence
VDEIGPQALSRLLIVY

SEQ ID NO: 4514 - protein, 8 aa, Artificial
  helical interface sequence
PEYRHLLD

SEQ ID NO: 4515 - protein, 26 aa, Artificial
  helical interface sequence
YLQEIYNSNNQKIVNLKEKVAQLEAQ

SEQ ID NO: 4516 - protein, 10 aa, Artificial
  helical interface sequence
KPAIRRLARR

SEQ ID NO: 4517 - protein, 35 aa, Artificial; identical to SEQ ID NO: 651
  helical interface sequence

SEQ ID NO: 4518 - protein, 14 aa, Artificial
  helical interface sequence
FTSIARIGDYILKS

SEQ ID NO: 4519 - protein, 8 aa, Artificial
  helical interface sequence
WKDVKARI

SEQ ID NO: 4520 - protein, 11 aa, Artificial
  helical interface sequence
FEDYVEGLRVF

SEQ ID NO: 4521 - protein, 8 aa, Artificial
  helical interface sequence
TYADFIAS

SEQ ID NO: 4522 - protein, 14 aa, Artificial
  helical interface sequence
EMGFAGIAVGAAMA

SEQ ID NO: 4523 - protein, 52 aa, Artificial; identical to SEQ ID NO: 329
  helical interface sequence

SEQ ID NO: 4524 - protein, 5 aa, Artificial
  helical interface sequence
EQLKS

SEQ ID NO: 4525 - protein, 8 aa, Artificial
  helical interface sequence
PLHYACFW

SEQ ID NO: 4526 - protein, 8 aa, Artificial
  helical interface sequence
RDEFRRKY

SEQ ID NO: 4527 - protein, 12 aa, Artificial
  helical interface sequence
RFEVELEFIQSL

SEQ ID NO: 4528 - protein, 17 aa, Artificial
  helical interface sequence
DSTRETVLKQIREFLEE

SEQ ID NO: 4529 - protein, 20 aa, Artificial
  helical interface sequence
DSTRETVLKQIREFLEEIVD

SEQ ID NO: 4530 - protein, 23 aa, Artificial
  helical interface sequence
LHQVENKTSEVKQLIKAIQLTYN

SEQ ID NO: 4531 - protein, 19 aa, Artificial
  helical interface sequence
YLKAQKVRRLITNDFLKAF

SEQ ID NO: 4532 - protein, 21 aa, Artificial
  helical interface sequence
DIIAAAKRMALLMAEMSRLVR

SEQ ID NO: 4533 - protein, 58 aa, Artificial; identical to SEQ ID NO: 1822
  helical interface sequence

SEQ ID NO: 4534 - protein, 12 aa, Artificial
  helical interface sequence
KEELKRSLYALF

SEQ ID NO: 4535 - protein, 15 aa, Artificial
  helical interface sequence
ALDAVEKGVRLVEDD

SEQ ID NO: 4536 - protein, 12 aa, Artificial
  helical interface sequence
IVTKSIVNADAE

SEQ ID NO: 4537 - protein, 6 aa, Artificial
  helical interface sequence
GFNKLG

SEQ ID NO: 4538 - protein, 12 aa, Artificial
  helical interface sequence
GLEVVKALAQGG

SEQ ID NO: 4539 - protein, 14 aa, Artificial
  helical interface sequence
LQSKIAYLRRKMVS

SEQ ID NO: 4540 - protein, 8 aa, Artificial
  helical interface sequence
TIMGRIAK

SEQ ID NO: 4541 - protein, 14 aa, Artificial
  helical interface sequence
AIPTGVKIFNWLFT

SEQ ID NO: 4542 - protein, 22 aa, Artificial
  helical interface sequence
ADYKTAMAGQMVKRALNAAWAR

SEQ ID NO: 4543 - protein, 43 aa, Artificial; identical to SEQ ID NO: 967
  helical interface sequence

SEQ ID NO: 4544 - protein, 14 aa, Artificial
  helical interface sequence
QGTLFELILAANYL

SEQ ID NO: 4545 - protein, 7 aa, Artificial
  helical interface sequence
KRWYRLA

SEQ ID NO: 4546 - protein, 15 aa, Artificial
  helical interface sequence
VERAGHLLCDKAQKN

SEQ ID NO: 4547 - protein, 8 aa, Artificial
  helical interface sequence
EKFIFQKM

SEQ ID NO: 4548 - protein, 10 aa, Artificial
  helical interface sequence
IKEKYIFQKM

SEQ ID NO: 4549 - protein, 6 aa, Artificial
  helical interface sequence
LEIILK

SEQ ID NO: 4550 - protein, 5 aa, Artificial
  helical interface sequence
DEQLK

SEQ ID NO: 4551 - protein, 14 aa, Artificial
  helical interface sequence
DEEKVRIAAKFITH

SEQ ID NO: 4552 - protein, 17 aa, Artificial
  helical interface sequence
KKKLKHIYEEAFEDFLD

SEQ ID NO: 4553 - protein, 22 aa, Artificial
  helical interface sequence
TYHIISQLESFVNQQEALKNIL

SEQ ID NO: 4554 - protein, 21 aa, Artificial
  helical interface sequence
RDEYYHLLAEKIYKIQKELEE

SEQ ID NO: 4555 - protein, 17 aa, Artificial
  helical interface sequence
KNDLQNMSADLAKNGFK

SEQ ID NO: 4556 - protein, 42 aa, Artificial; identical to SEQ ID NO: 1936
  helical interface sequence

SEQ ID NO: 4557 - protein, 10 aa, Artificial
  helical interface sequence
ESAWNYLKGI

SEQ ID NO: 4558 - protein, 19 aa, Artificial
  helical interface sequence
FWESDDNDNMETASQNGKK

SEQ ID NO: 4559 - protein, 9 aa, Artificial
  helical interface sequence
WQMLEMLKP

SEQ ID NO: 4560 - protein, 31 aa, Artificial; identical to SEQ ID NO: 3332
  helical interface sequence

SEQ ID NO: 4561 - protein, 7 aa, Artificial
  helical interface sequence
PWTQRYF

SEQ ID NO: 4562 - protein, 29 aa, Artificial
  helical interface sequence
QSFLLKCLEQVRKIQGDGAALQEKLCATY

SEQ ID NO: 4563 - protein, 14 aa, Artificial
  helical interface sequence
LGPALKICNLVNKV

SEQ ID NO: 4564 - protein, 6 aa, Artificial
  helical interface sequence
MMELAE

SEQ ID NO: 4565 - protein, 22 aa, Artificial
  helical interface sequence
YNEFENLRRAGIVHADMRGYSY

SEQ ID NO: 4566 - protein, 27 aa, Artificial
  helical interface sequence
PLLCGIVLGLVPVTIAGLFVTAYLQYL

SEQ ID NO: 4567 - protein, 21 aa, Artificial
  helical interface sequence
HTIAAFLGGAAAQEVIKIITK

SEQ ID NO: 4568 - protein, 14 aa, Artificial
  helical interface sequence
AKNYGRAVYECLRG

SEQ ID NO: 4569 - protein, 20 aa, Artificial
  helical interface sequence
ERIPTISTQLKILSTVKATM

SEQ ID NO: 4570 - protein, 12 aa, Artificial
  helical interface sequence
GQIDYALTAVKQ

SEQ ID NO: 4571 - protein, 11 aa, Artificial
  helical interface sequence
YQVEYALESIS

SEQ ID NO: 4572 - protein, 12 aa, Artificial
  helical interface sequence
PSGAWNFWTKKG

SEQ ID NO: 4573 - protein, 17 aa, Artificial
  helical interface sequence
RFVMKKLNDRVMRVEYH

SEQ ID NO: 4574 - protein, 19 aa, Artificial
  helical interface sequence
EETRVHLLTKLADIEYSIS

SEQ ID NO: 4575 - protein, 21 aa, Artificial
  helical interface sequence
PGNRNMATFGMMDENRHGQIQ

SEQ ID NO: 4576 - protein, 14 aa, Artificial
  helical interface sequence
FITFLGALKSFLKG

SEQ ID NO: 4577 - protein, 16 aa, Artificial
  helical interface sequence
EEEQIAYAMQMSLQGA

SEQ ID NO: 4578 - protein, 13 aa, Artificial
  helical interface sequence
TEFEYLRKVLFEY

SEQ ID NO: 4579 - protein, 13 aa, Artificial
  helical interface sequence
TEFEYLRKVLFEY

SEQ ID NO: 4580 - protein, 14 aa, Artificial
  helical interface sequence
AKNYGRAVYECLRG

SEQ ID NO: 4581 - protein, 8 aa, Artificial
  helical interface sequence
FSMRVSAR

SEQ ID NO: 4582 - protein, 14 aa, Artificial
  helical interface sequence
EEWVAKQTKRMLDM

SEQ ID NO: 4583 - protein, 10 aa, Artificial
  helical interface sequence
QVGYWAVKIV

SEQ ID NO: 4584 - protein, 14 aa, Artificial
  helical interface sequence
HGHLQGALSAITNE

SEQ ID NO: 4585 - protein, 15 aa, Artificial
  helical interface sequence
FHVIEEQMAAAVELF

SEQ ID NO: 4586 - protein, 14 aa, Artificial
  helical interface sequence
PEYRAVLRAYLEAV

SEQ ID NO: 4587 - protein, 15 aa, Artificial
  helical interface sequence
ASSKELLMKLRRKTG

SEQ ID NO: 4588 - protein, 19 aa, Artificial
  helical interface sequence
LIEARKYLEQLHRKLKNCK

SEQ ID NO: 4589 - protein, 11 aa, Artificial
  helical interface sequence
YYSHPRLFWLS

SEQ ID NO: 4590 - protein, 20 aa, Artificial
  helical interface sequence
PEFKAHIARVLGGLDRVISM

SEQ ID NO: 4591 - protein, 42 aa, Artificial
  helical interface sequence
AEEQLRKIDMLQKKLVEVEDEKIEAIKKKEKLLRHVDSLIED

SEQ ID NO: 4592 - protein, 22 aa, Artificial
  helical interface sequence
PDMYERKVENIRTILVNIHHLL

SEQ ID NO: 4593 - protein, 16 aa, Artificial
  helical interface sequence
FGVTLGNPLRRILLSS

SEQ ID NO: 4594 - protein, 23 aa, Artificial
  helical interface sequence
AADCQFWETWLGSQCRLHELREK

SEQ ID NO: 4595 - protein, 15 aa, Artificial
  helical interface sequence
INSAARNIQHLLYGK

SEQ ID NO: 4596 - protein, 13 aa, Artificial
  helical interface sequence
TVALREIRRYQKS

SEQ ID NO: 4597 - protein, 13 aa, Artificial
  helical interface sequence
TVALREIRRYQKS

SEQ ID NO: 4598 - protein, 27 aa, Artificial
  helical interface sequence
IYEETRGVLKVFLENVIRDAVTYTEHA

SEQ ID NO: 4599 - protein, 12 aa, Artificial
  helical interface sequence
AIYVYKVLKQVH

SEQ ID NO: 4600 - protein, 48 aa, Artificial; identical to SEQ ID NO: 1509
  helical interface sequence

SEQ ID NO: 4601 - protein, 10 aa, Artificial
  helical interface sequence
LWERFCNWVT

SEQ ID NO: 4602 - protein, 13 aa, Artificial
  helical interface sequence
QKEIDRLNEVAKN

SEQ ID NO: 4603 - protein, 6 aa, Artificial
  helical interface sequence
THWYEN

SEQ ID NO: 4604 - protein, 6 aa, Artificial
  helical interface sequence
TLESDD

SEQ ID NO: 4605 - protein, 17 aa, Artificial
  helical interface sequence
SSIREEVHRHLGTVALM

SEQ ID NO: 4606 - protein, 18 aa, Artificial
  helical interface sequence
LTELHNKIVEMRERVASG

SEQ ID NO: 4607 - protein, 15 aa, Artificial
  helical interface sequence
IREEVHRHLGTVALM

SEQ ID NO: 4608 - protein, 25 aa, Artificial
  helical interface sequence
EDGLRQVLEEMKALYEQNQSDVNEA

SEQ ID NO: 4609 - protein, 27 aa, Artificial
  helical interface sequence
EDGLRQVLEEMKALYEQNQSDVNEAKS

SEQ ID NO: 4610 - protein, 13 aa, Artificial
  helical interface sequence
TVALREIRRYQKS

SEQ ID NO: 4611 - protein, 23 aa, Artificial
  helical interface sequence
AAVAVEFARLYAVELEHYEKLEG

SEQ ID NO: 4612 - protein, 11 aa, Artificial
  helical interface sequence
KPAIRRLARRG

SEQ ID NO: 4613 - protein, 8 aa, Artificial
  helical interface sequence
FMDVYQRS

SEQ ID NO: 4614 - protein, 10 aa, Artificial
  helical interface sequence
PRDAQHFTQR

SEQ ID NO: 4615 - protein, 10 aa, Artificial
  helical interface sequence
RPDAEYWNSQ

SEQ ID NO: 4616 - protein, 22 aa, Artificial
  helical interface sequence
KDLLEQRRAAVDTYCRHNYGVG

SEQ ID NO: 4617 - protein, 36 aa, Artificial
  helical interface sequence
LWGRLVAVVVMVAGITSFGLVTAALATWFVGREQER

SEQ ID NO: 4618 - protein, 11 aa, Artificial
  helical interface sequence
AVPRAILELAG

SEQ ID NO: 4619 - protein, 6 aa, Artificial
  helical interface sequence
IAQDFK

SEQ ID NO: 4620 - protein, 8 aa, Artificial
  helical interface sequence
WLPFARAA

SEQ ID NO: 4621 - protein, 12 aa, Artificial
  helical interface sequence
YLHRMTTLFCIN

SEQ ID NO: 4622 - protein, 12 aa, Artificial
  helical interface sequence
ELGRPDAEYWNS

SEQ ID NO: 4623 - protein, 9 aa, Artificial
  helical interface sequence
PEEVEEVIG

SEQ ID NO: 4624 - protein, 5 aa, Artificial
  helical interface sequence
PLAQN

SEQ ID NO: 4625 - protein, 19 aa, Artificial
  helical interface sequence
KDQLHPLLAELLISINRVT

SEQ ID NO: 4626 - protein, 24 aa, Artificial
  helical interface sequence
HVPLAFCVPIFMFCVLQVFRPLLL

SEQ ID NO: 4627 - protein, 15 aa, Artificial
  helical interface sequence
IWPHIDWLTAFSIRY

SEQ ID NO: 4628 - protein, 16 aa, Artificial
  helical interface sequence
EDVQEQAVWALGNIAG

SEQ ID NO: 4629 - protein, 15 aa, Artificial
  helical interface sequence
LSKQAVAYRQMSLLL

SEQ ID NO: 4630 - protein, 14 aa, Artificial
  helical interface sequence
DDMKRTINKAWVES

SEQ ID NO: 4631 - protein, 33 aa, Artificial
  helical interface sequence
ILVVLLSVMGAILLIGLAALLIWKLLITIHDRK

SEQ ID NO: 4632 - protein, 17 aa, Artificial
  helical interface sequence
WFEEYYKVGVALTRMRI

SEQ ID NO: 4633 - protein, 29 aa, Artificial
  helical interface sequence
SKAMSIMNSFVNDIFERIAAEASRLAHYN

SEQ ID NO: 4634 - protein, 11 aa, Artificial
  helical interface sequence
ERVKRGMAEMQ

SEQ ID NO: 4635 - protein, 21 aa, Artificial
  helical interface sequence
HTIAAFLGGAAAQEVIKIITK

SEQ ID NO: 4636 - protein, 12 aa, Artificial
  helical interface sequence
EDTFKQIYAQFF

SEQ ID NO: 4637 - protein, 22 aa, Artificial
  helical interface sequence
QMAAVKQALREAGDEFELRYRR

SEQ ID NO: 4638 - protein, 9 aa, Artificial
  helical interface sequence
PLHLAAKTG

SEQ ID NO: 4639 - protein, 5 aa, Artificial
  helical interface sequence
PWITD

SEQ ID NO: 4640 - protein, 5 aa, Artificial
  helical interface sequence
PWITD

SEQ ID NO: 4641 - protein, 37 aa, Artificial
  helical interface sequence
IPTIKFRHCSLLRNRRCTVAYLYDRLLRIRALRWEYG

SEQ ID NO: 4642 - protein, 7 aa, Artificial
  helical interface sequence
SSSKKYF

SEQ ID NO: 4643 - protein, 10 aa, Artificial
  helical interface sequence
SSLEEAAALD

SEQ ID NO: 4644 - protein, 19 aa, Artificial
  helical interface sequence
PAVHASLDKFLANVSTVLT

SEQ ID NO: 4645 - protein, 19 aa, Artificial
  helical interface sequence
AVKERDAVKDLLQQLLPKF

SEQ ID NO: 4646 - protein, 27 aa, Artificial
  helical interface sequence
STEIQVAFGRFRQAAAGLSAATALTSA

SEQ ID NO: 4647 - protein, 27 aa, Artificial
  helical interface sequence
STEIQVAFGRFRQAAAGLSAATALTSA

SEQ ID NO: 4648 - protein, 8 aa, Artificial
  helical interface sequence
YHGVAAAF

SEQ ID NO: 4649 - protein, 8 aa, Artificial
  helical interface sequence
YHGVAAAF

SEQ ID NO: 4650 - protein, 16 aa, Artificial
  helical interface sequence
TPQLEEIFFELTHNLN

SEQ ID NO: 4651 - protein, 15 aa, Artificial
  helical interface sequence
EEQIAEFKEAFSLFD

SEQ ID NO: 4652 - protein, 14 aa, Artificial
  helical interface sequence
YTEKQIGYLFISVL

SEQ ID NO: 4653 - protein, 17 aa, Artificial
  helical interface sequence
SEEVDVERLVNQGLKRV

SEQ ID NO: 4654 - protein, 11 aa, Artificial
  helical interface sequence
HSREMKVIERY

SEQ ID NO: 4655 - protein, 19 aa, Artificial
  helical interface sequence
PVELEKLVREKKRELMELR

SEQ ID NO: 4656 - protein, 15 aa, Artificial
  helical interface sequence
VERAGHLLCDKAQKN

SEQ ID NO: 4657 - protein, 12 aa, Artificial
  helical interface sequence
YQVEYALESISH

SEQ ID NO: 4658 - protein, 22 aa, Artificial
  helical interface sequence
AADCQFWETWLGSQCRLHELRE

SEQ ID NO: 4659 - protein, 19 aa, Artificial
  helical interface sequence
PENFRLLGDILIIVLAGHF

SEQ ID NO: 4660 - protein, 11 aa, Artificial
  helical interface sequence
LFADRVFDLFD

SEQ ID NO: 4661 - protein, 25 aa, Artificial
  helical interface sequence
AILTLGWVSLLVVFTWSIAMVVWGR

SEQ ID NO: 4662 - protein, 38 aa, Artificial
  helical interface sequence
SQYWKEVAEQRRKALYEALKENEKLHKEIEQKDSEIAR

SEQ ID NO: 4663 - protein, 12 aa, Artificial
  helical interface sequence
GLIVFWAGAMTL

SEQ ID NO: 4664 - protein, 21 aa, Artificial
  helical interface sequence
YVIFYGCLAGIFIGTIQVMLL

SEQ ID NO: 4665 - protein, 14 aa, Artificial
  helical interface sequence
ASWIINGIEWAIAN

SEQ ID NO: 4666 - protein, 24 aa, Artificial
  helical interface sequence
LWIVATVAGMGVIVIVGLFFYGAY

SEQ ID NO: 4667 - protein, 29 aa, Artificial
  helical interface sequence
SKAMSIMNSFVNDVFERIAGEASRLAHYN

SEQ ID NO: 4668 - protein, 8 aa, Artificial
  helical interface sequence
ETFDAWYC

SEQ ID NO: 4669 - protein, 21 aa, Artificial
  helical interface sequence
ISEAFEDLSKLMIKAKEMVEL

SEQ ID NO: 4670 - protein, 23 aa, Artificial
  helical interface sequence
TEELFDFLHARDHCVAHKLFNKL

SEQ ID NO: 4671 - protein, 8 aa, Artificial
  helical interface sequence
WKDVKARI

SEQ ID NO: 4672 - protein, 11 aa, Artificial
  helical interface sequence
LSDQMSVLQSV

SEQ ID NO: 4673 - protein, 12 aa, Artificial
  helical interface sequence
PHLLWEVVRWQL

SEQ ID NO: 4674 - protein, 26 aa, Artificial
  helical interface sequence
KAFAKRQQQLTAMKVIQRNCAAYLKL

SEQ ID NO: 4675 - protein, 13 aa, Artificial
  helical interface sequence
GDFYEGINFAGAF

SEQ ID NO: 4676 - protein, 13 aa, Artificial
  helical interface sequence
PEERHLSKMQQNG

SEQ ID NO: 4677 - protein, 16 aa, Artificial
  helical interface sequence
GESLLGTQLLVDVVTG

SEQ ID NO: 4678 - protein, 8 aa, Artificial
  helical interface sequence
YKWLSYTL

SEQ ID NO: 4679 - protein, 15 aa, Artificial
  helical interface sequence
IDQVINSAAKTYYMS

SEQ ID NO: 4680 - protein, 12 aa, Artificial
  helical interface sequence
PRILAAVVEFAF

SEQ ID NO: 4681 - protein, 15 aa, Artificial
  helical interface sequence
PGWQGLRELMEKQLT

SEQ ID NO: 4682 - protein, 24 aa, Artificial
  helical interface sequence
QEIYNSNNQKIVNLKEKVAQLEAQ

SEQ ID NO: 4683 - protein, 10 aa, Artificial
  helical interface sequence
RELDELMASL

SEQ ID NO: 4684 - protein, 18 aa, Artificial
  helical interface sequence
PFTQNLGKFAVDEENKIG

SEQ ID NO: 4685 - protein, 12 aa, Artificial
  helical interface sequence
AITAVINSSDVQ

SEQ ID NO: 4686 - protein, 8 aa, Artificial
  helical interface sequence
HIQYLRES

SEQ ID NO: 4687 - protein, 32 aa, Artificial; identical to SEQ ID NO: 3818
  helical interface sequence

SEQ ID NO: 4688 - protein, 22 aa, Artificial
  helical interface sequence
PLSQCLFWALVADLLTLTWIGG

SEQ ID NO: 4689 - protein, 14 aa, Artificial
  helical interface sequence
YTVWHFRRVLLRSL

SEQ ID NO: 4690 - protein, 15 aa, Artificial
  helical interface sequence
AEETRRMLHRAFDTL

SEQ ID NO: 4691 - protein, 5 aa, Artificial
  helical interface sequence
DRLRP

SEQ ID NO: 4692 - protein, 17 aa, Artificial
  helical interface sequence
PIGMNGALAKTYGAERM

SEQ ID NO: 4693 - protein, 19 aa, Artificial
  helical interface sequence
ELAKHAVSEGTKAVTKYTS

SEQ ID NO: 4694 - protein, 29 aa, Artificial
  helical interface sequence
SKAMGIMNSFVNDIFERIAGEASRLAHYN

SEQ ID NO: 4695 - protein, 7 aa, Artificial
  helical interface sequence
SDFQCKD

SEQ ID NO: 4696 - protein, 27 aa, Artificial
  helical interface sequence
NTELQVVNGRYNRATSSLEAAKALTAN

SEQ ID NO: 4697 - protein, 15 aa, Artificial
  helical interface sequence
KEYWRYIGRSLQSKH

SEQ ID NO: 4698 - protein, 7 aa, Artificial
  helical interface sequence
KRWYRLA

SEQ ID NO: 4699 - protein, 37 aa, Artificial
  helical interface sequence
PKALLDTLLRRYVESQVYQGVVENLASEQAARMVAMK

SEQ ID NO: 4700 - protein, 16 aa, Artificial
  helical interface sequence
VDEVGGEALGRLLVVY

SEQ ID NO: 4701 - protein, 12 aa, Artificial
  helical interface sequence
AFTKVVSQADTR

SEQ ID NO: 4702 - protein, 13 aa, Artificial
  helical interface sequence
GDNILRLYGEARG

SEQ ID NO: 4703 - protein, 11 aa, Artificial
  helical interface sequence
FSHSFSALAKF

SEQ ID NO: 4704 - protein, 27 aa, Artificial
  helical interface sequence
KDSRLKRKGLVKKVQAFLAECDTVEQN

SEQ ID NO: 4705 - protein, 22 aa, Artificial
  helical interface sequence
IADAKTLIDKARVETQNHWFTY

SEQ ID NO: 4706 - protein, 12 aa, Artificial
  helical interface sequence
FQVEYDIEAIKL

SEQ ID NO: 4707 - protein, 12 aa, Artificial
  helical interface sequence
FQVEYAMKAVEN

SEQ ID NO: 4708 - protein, 11 aa, Artificial
  helical interface sequence
AAELRHVMTNL

SEQ ID NO: 4709 - protein, 13 aa, Artificial
  helical interface sequence
DEEKVRIAAKFIT

SEQ ID NO: 4710 - protein, 15 aa, Artificial
  helical interface sequence
INSAARNIQHLLYGK

SEQ ID NO: 4711 - protein, 9 aa, Artificial
  helical interface sequence
PARIKKIMQ

SEQ ID NO: 4712 - protein, 14 aa, Artificial
  helical interface sequence
YKPIIAEAAKMAVG

SEQ ID NO: 4713 - protein, 17 aa, Artificial
  helical interface sequence
KKKLKHIYEEAFEDFLD

SEQ ID NO: 4714 - protein, 17 aa, Artificial
  helical interface sequence
RELLITDLLLRIEHYLQ

SEQ ID NO: 4715 - protein, 5 aa, Artificial
  helical interface sequence
WKVGF

SEQ ID NO: 4716 - protein, 13 aa, Artificial
  helical interface sequence
TVALREIRRYQKS

SEQ ID NO: 4717 - protein, 31 aa, Artificial
  helical interface sequence
KGRSYAYFMVGAMGLLSSAGAKSTVETFISS

SEQ ID NO: 4718 - protein, 11 aa, Artificial
  helical interface sequence
EEIREAFRVFD

SEQ ID NO: 4719 - protein, 14 aa, Artificial
  helical interface sequence
QDYKDMLAKKRDGF

SEQ ID NO: 4720 - protein, 12 aa, Artificial
  helical interface sequence
SGARATVQEIWQ

SEQ ID NO: 4721 - protein, 13 aa, Artificial
  helical interface sequence
KEYWRYIGRSLQS

SEQ ID NO: 4722 - protein, 14 aa, Artificial
  helical interface sequence
EEWVAKQTKRMLDM

SEQ ID NO: 4723 - protein, 12 aa, Artificial
  helical interface sequence
IDEKVELYRLKF

SEQ ID NO: 4724 - protein, 28 aa, Artificial
  helical interface sequence
EWKTVVGAAMFFIGFTALLLIWEKHYVY

SEQ ID NO: 4725 - protein, 14 aa, Artificial
  helical interface sequence
EEWVAKQTKRMLDM

SEQ ID NO: 4726 - protein, 12 aa, Artificial
  helical interface sequence
MQCQRRFYEALH

SEQ ID NO: 4727 - protein, 8 aa, Artificial
  helical interface sequence
ALLRYLLD

SEQ ID NO: 4728 - protein, 40 aa, Artificial
  helical interface sequence
AAAFWRNFDEIVHDLAPENRQLLAERDRIQAALDEWHRSN

SEQ ID NO: 4729 - protein, 18 aa, Artificial
  helical interface sequence
LSDAYATFALMMSISDSL

SEQ ID NO: 4730 - protein, 7 aa, Artificial
  helical interface sequence
PLQFFRQ

SEQ ID NO: 4731 - protein, 9 aa, Artificial
  helical interface sequence
AYSYIREAW

SEQ ID NO: 4732 - protein, 23 aa, Artificial
  helical interface sequence
AQGALANIAVDKANLDVMKERSN

SEQ ID NO: 4733 - protein, 8 aa, Artificial
  helical interface sequence
RPLWRHYF

SEQ ID NO: 4734 - protein, 29 aa, Artificial
  helical interface sequence
RRIENLNKKVDDGFLDIWTYNAELLVLLE

SEQ ID NO: 4735 - protein, 6 aa, Artificial
  helical interface sequence
WRHYFQ

SEQ ID NO: 4736 - protein, 28 aa, Artificial
  helical interface sequence
RTIESILEPVAQQISHLVIMHEEGEVDG

SEQ ID NO: 4737 - protein, 10 aa, Artificial
  helical interface sequence
YEELREQLSS

SEQ ID NO: 4738 - protein, 11 aa, Artificial
  helical interface sequence
YQVEYALESIS

SEQ ID NO: 4739 - protein, 15 aa, Artificial
  helical interface sequence
ALDVVTEAVRLLEEC

SEQ ID NO: 4740 - protein, 10 aa, Artificial
  helical interface sequence
KILHRLLQEG

SEQ ID NO: 4741 - protein, 24 aa, Artificial
  helical interface sequence
PEQLFAAGYAACFQGALGVVSRRN

SEQ ID NO: 4742 - protein, 15 aa, Artificial
  helical interface sequence
AKNYGRAVYECLRGG

SEQ ID NO: 4743 - protein, 23 aa, Artificial
  helical interface sequence
TILPAIILILIALPSLRILYMMD

SEQ ID NO: 4744 - protein, 29 aa, Artificial
  helical interface sequence
TLLMIGLTTNMLTMYQWWRDVIRESTFQG

SEQ ID NO: 4745 - protein, 10 aa, Artificial
  helical interface sequence
YSHPRLFWLS

SEQ ID NO: 4746 - protein, 25 aa, Artificial
  helical interface sequence
GATVCVLGLLLGEWINRYFNFWGWT

SEQ ID NO: 4747 - protein, 20 aa, Artificial
  helical interface sequence
PEFKAHIARVLGGLDRVISM

SEQ ID NO: 4748 - protein, 35 aa, Artificial; identical to SEQ ID NO: 2686
  helical interface sequence

SEQ ID NO: 4749 - protein, 23 aa, Artificial
  helical interface sequence
TADARSMIEHARTAAVTHNLYYD

SEQ ID NO: 4750 - protein, 10 aa, Artificial
  helical interface sequence
YQVEYAFKAT

SEQ ID NO: 4751 - protein, 7 aa, Artificial
  helical interface sequence
YYSYYYS

SEQ ID NO: 4752 - protein, 41 aa, Artificial; identical to SEQ ID NO: 2156
  helical interface sequence

SEQ ID NO: 4753 - protein, 12 aa, Artificial
  helical interface sequence
AIYVYKVLKQVH

SEQ ID NO: 4754 - protein, 6 aa, Artificial
  helical interface sequence
TDLIYY

SEQ ID NO: 4755 - protein, 10 aa, Artificial
  helical interface sequence
LPNIMKAKKK

SEQ ID NO: 4756 - protein, 10 aa, Artificial
  helical interface sequence
MVTANRFWSQ

SEQ ID NO: 4757 - protein, 23 aa, Artificial
  helical interface sequence
TVLSSSIAAVFFAAFVVAGTMWY

SEQ ID NO: 4758 - protein, 11 aa, Artificial
  helical interface sequence
IEVGEEMDEIT

SEQ ID NO: 4759 - protein, 18 aa, Artificial
  helical interface sequence
RRSIEISKVSKEAFEAVI

SEQ ID NO: 4760 - protein, 15 aa, Artificial
  helical interface sequence
EEQIAEFKEAFSLFD

SEQ ID NO: 4761 - protein, 18 aa, Artificial
  helical interface sequence
RREIELSKVIREALESAV

SEQ ID NO: 4762 - protein, 13 aa, Artificial
  helical interface sequence
EVFMKTLNYTARF

SEQ ID NO: 4763 - protein, 13 aa, Artificial
  helical interface sequence
EVFMKTLNYTARF

SEQ ID NO: 4764 - protein, 16 aa, Artificial
  helical interface sequence
SIREEVHRHLGTVALM

SEQ ID NO: 4765 - protein, 16 aa, Artificial
  helical interface sequence
SIREEVHRHLGTVALM

SEQ ID NO: 4766 - protein, 16 aa, Artificial
  helical interface sequence
SIREEVHRHLGTVALM

SEQ ID NO: 4767 - protein, 20 aa, Artificial
  helical interface sequence
REVCSARVNVVQSFHMDSWG

SEQ ID NO: 4768 - protein, 33 aa, Artificial
  helical interface sequence
PTVDVALIVYLDLVTKVGFGFIALDAAATLRAE

SEQ ID NO: 4769 - protein, 33 aa, Artificial; identical to SEQ ID NO: 4768
  helical interface sequence

SEQ ID NO: 4770 - protein, 35 aa, Artificial
  helical interface sequence
SKCWREEYHKARQKQIQEDWELAERLQREEEEAFA

SEQ ID NO: 4771 - protein, 10 aa, Artificial
  helical interface sequence
PRDAQHFTQR

SEQ ID NO: 4772 - protein, 10 aa, Artificial
  helical interface sequence
PRDAQHFTQR

SEQ ID NO: 4773 - protein, 36 aa, Artificial
  helical interface sequence
TAQIADLDQEYDDFWDEDGEVMRDYRLRVSDALSKL

SEQ ID NO: 4774 - protein, 31 aa, Artificial
  helical interface sequence
DAIKKKMQMLKLDNYHLENEVARLKKLVGER

SEQ ID NO: 4775 - protein, 17 aa, Artificial
  helical interface sequence
TLESDDGENMSSATYIN

SEQ ID NO: 4776 - protein, 14 aa, Artificial
  helical interface sequence
PLDVVELVVRELEN

SEQ ID NO: 4777 - protein, 6 aa, Artificial
  helical interface sequence
LNDLYR

SEQ ID NO: 4778 - protein, 22 aa, Artificial
  helical interface sequence
QEQLEHRERSLQTLRDIQRMLF

SEQ ID NO: 4779 - protein, 9 aa, Artificial
  helical interface sequence
VVAYAAGAR

SEQ ID NO: 4780 - protein, 18 aa, Artificial
  helical interface sequence
DTHIRELEDYIDNLLVRV

SEQ ID NO: 4781 - protein, 11 aa, Artificial
  helical interface sequence
LGQLVEAAIQA

SEQ ID NO: 4782 - protein, 11 aa, Artificial
  helical interface sequence
YAGFVDLTTEC

SEQ ID NO: 4783 - protein, 8 aa, Artificial
  helical interface sequence
TVTFGFSA

SEQ ID NO: 4784 - protein, 25 aa, Artificial
  helical interface sequence
YGAYVGNRAKMQESAETSFGFCEKR

SEQ ID NO: 4785 - protein, 21 aa, Artificial
  helical interface sequence
EEDTGVTNRDLISRRIKEYNN

SEQ ID NO: 4786 - protein, 69 aa, Artificial; identical to SEQ ID NO: 2946
  helical interface sequence

SEQ ID NO: 4787 - protein, 24 aa, Artificial
  helical interface sequence
LKDECAQLRRIGDKVNLRQKLLNM

SEQ ID NO: 4788 - protein, 5 aa, Artificial
  helical interface sequence
PQWQN

SEQ ID NO: 4789 - protein, 18 aa, Artificial
  helical interface sequence
NQHLCGSHLVEALYLVCG

SEQ ID NO: 4790 - protein, 19 aa, Artificial
  helical interface sequence
VNQHLCGSHLVEALYLVCG

SEQ ID NO: 4791 - protein, 22 aa, Artificial
  helical interface sequence
VLGNLEEMRDERLSKIISMFQA

SEQ ID NO: 4792 - protein, 9 aa, Artificial
  helical interface sequence
DRLRPLSYP

SEQ ID NO: 4793 - protein, 9 aa, Artificial
  helical interface sequence
QMFTDALGI

SEQ ID NO: 4794 - protein, 6 aa, Artificial
  helical interface sequence
VLTKRS

SEQ ID NO: 4795 - protein, 37 aa, Artificial; identical to SEQ ID NO: 4641
  helical interface sequence

SEQ ID NO: 4796 - protein, 29 aa, Artificial
  helical interface sequence
GFMLRYLHANGASLFFIAVYLHIFRGLYY

SEQ ID NO: 4797 - protein, 23 aa, Artificial
  helical interface sequence
VERLCFQIEQAHWFYEDFIRAQN

SEQ ID NO: 4798 - protein, 12 aa, Artificial
  helical interface sequence
PLTDAVSTADSQ

SEQ ID NO: 4799 - protein, 14 aa, Artificial
  helical interface sequence
KEFLLYLAGFVDGD

SEQ ID NO: 4800 - protein, 15 aa, Artificial
  helical interface sequence
DEMNAELQSKLKDLF

SEQ ID NO: 4801 - protein, 13 aa, Artificial
  helical interface sequence
NLLTQAIRQQYYK

SEQ ID NO: 4802 - protein, 7 aa, Artificial
  helical interface sequence
ITQMAAM

SEQ ID NO: 4803 - protein, 13 aa, Artificial
  helical interface sequence
FQVEYALEAIKQG

SEQ ID NO: 4804 - protein, 22 aa, Artificial
  helical interface sequence
APDARVLSNYLRQQCNYSSLVF

SEQ ID NO: 4805 - protein, 10 aa, Artificial
  helical interface sequence
VREVFARQLM

SEQ ID NO: 4806 - protein, 25 aa, Artificial
  helical interface sequence
AILTLGWVSLLVVFTWSIAMVVWGR

SEQ ID NO: 4807 - protein, 51 aa, Artificial
  helical interface sequence
IVMETVPVLKAQADIYKADFQAERHAREKLVEKKEYLQEQLEQLQREFNKL

SEQ ID NO: 4808 - protein, 43 aa, Artificial
  helical interface sequence
YWKEVAEQRRKALYEALKENEKLHKEIEQKDSEIARLRKENKD

SEQ ID NO: 4809 - protein, 8 aa, Artificial
  helical interface sequence
RKSIYDYF

SEQ ID NO: 4810 - protein, 60 aa, Artificial; identical to SEQ ID NO: 2060
  helical interface sequence

SEQ ID NO: 4811 - protein, 17 aa, Artificial
  helical interface sequence
YGDFRQIRDIMQALLVR

SEQ ID NO: 4812 - protein, 19 aa, Artificial
  helical interface sequence
FVKEIKKTAELMEKAAAEG

SEQ ID NO: 4813 - protein, 31 aa, Artificial; identical to SEQ ID NO: 2505
  helical interface sequence

SEQ ID NO: 4814 - protein, 31 aa, Artificial; identical to SEQ ID NO: 2505
  helical interface sequence

SEQ ID NO: 4815 - protein, 20 aa, Artificial
  helical interface sequence
ISHEIRNPLTAARGFIQLIE

SEQ ID NO: 4816 - protein, 18 aa, Artificial
  helical interface sequence
HRLIDQATAEIVETAKRT

SEQ ID NO: 4817 - protein, 16 aa, Artificial
  helical interface sequence
VDEVGGEALGRLLVVY

SEQ ID NO: 4818 - protein, 17 aa, Artificial
  helical interface sequence
PYMQEVVPFLARLSNRL

SEQ ID NO: 4819 - protein, 10 aa, Artificial
  helical interface sequence
AEYFAYQMRY

SEQ ID NO: 4820 - protein, 14 aa, Artificial
  helical interface sequence
ESGIGGLAIGLALQ

SEQ ID NO: 4821 - protein, 13 aa, Artificial
  helical interface sequence
GQIFEAYNMAALW

SEQ ID NO: 4822 - protein, 15 aa, Artificial
  helical interface sequence
ERQYYQLFLNLLEAQ

SEQ ID NO: 4823 - protein, 11 aa, Artificial
  helical interface sequence
FTQILSTVEPK

SEQ ID NO: 4824 - protein, 8 aa, Artificial
  helical interface sequence
VAWRNRCK

SEQ ID NO: 4825 - protein, 9 aa, Artificial
  helical interface sequence
TTARRDLHK

SEQ ID NO: 4826 - protein, 12 aa, Artificial
  helical interface sequence
PRILAAVVEFAF

SEQ ID NO: 4827 - protein, 19 aa, Artificial
  helical interface sequence
TCGIADFLSTYQTKVDKDL

SEQ ID NO: 4828 - protein, 36 aa, Artificial
  helical interface sequence
DETVNSNIPTNLRVLRSILENLRSKIQKLESDVSAQ

SEQ ID NO: 4829 - protein, 9 aa, Artificial
  helical interface sequence
GKQVISAFL

SEQ ID NO: 4830 - protein, 14 aa, Artificial
  helical interface sequence
DKIFDLAIKEYSEG

SEQ ID NO: 4831 - protein, 23 aa, Artificial
  helical interface sequence
PQVCAKLFGNIQKVVNFWLLHNG

SEQ ID NO: 4832 - protein, 11 aa, Artificial
  helical interface sequence
DEFIAHRLGLI

SEQ ID NO: 4833 - protein, 13 aa, Artificial
  helical interface sequence
LAMANSLRRVMIA

SEQ ID NO: 4834 - protein, 17 aa, Artificial
  helical interface sequence
ELLDLVEMEVRDLLNQY

SEQ ID NO: 4835 - protein, 13 aa, Artificial
  helical interface sequence
LFQFAKMINGKLG

SEQ ID NO: 4836 - protein, 11 aa, Artificial
  helical interface sequence
TASVNCAKKIV

SEQ ID NO: 4837 - protein, 12 aa, Artificial
  helical interface sequence
DEEVDEMIREAD

SEQ ID NO: 4838 - protein, 10 aa, Artificial
  helical interface sequence
KHAVVNLINY

SEQ ID NO: 4839 - protein, 19 aa, Artificial
  helical interface sequence
DFPLRIARNTGIVLAEEVN

SEQ ID NO: 4840 - protein, 21 aa, Artificial
  helical interface sequence
DNEKDNYLKGVTKLFERIYST

SEQ ID NO: 4841 - protein, 20 aa, Artificial
  helical interface sequence
GELAKHAVSEGTKAVTKYTS

SEQ ID NO: 4842 - protein, 47 aa, Artificial; identical to SEQ ID NO: 1689
  helical interface sequence

SEQ ID NO: 4843 - protein, 12 aa, Artificial
  helical interface sequence
PLTEAVSVADSQ

SEQ ID NO: 4844 - protein, 12 aa, Artificial
  helical interface sequence
AFTKVVSQADTR

SEQ ID NO: 4845 - protein, 13 aa, Artificial
  helical interface sequence
GDNILRLYGEARG

SEQ ID NO: 4846 - protein, 8 aa, Artificial
  helical interface sequence
AEYEALNF

SEQ ID NO: 4847 - protein, 19 aa, Artificial
  helical interface sequence
AQTGLSGWYLSMYLHKEQH

SEQ ID NO: 4848 - protein, 6 aa, Artificial
  helical interface sequence
ADVERL

SEQ ID NO: 4849 - protein, 20 aa, Artificial
  helical interface sequence
WRDRFLFVAEAIYKAQAETG

SEQ ID NO: 4850 - protein, 22 aa, Artificial
  helical interface sequence
IADAKTLIDKARVETQNHWFTY

SEQ ID NO: 4851 - protein, 5 aa, Artificial
  helical interface sequence
WLSAA

SEQ ID NO: 4852 - protein, 15 aa, Artificial
  helical interface sequence
NLPNMLRDLRDAFSR

SEQ ID NO: 4853 - protein, 8 aa, Artificial
  helical interface sequence
EWVPLLQP

SEQ ID NO: 4854 - protein, 8 aa, Artificial
  helical interface sequence
EWVPLLQP

SEQ ID NO: 4855 - protein, 11 aa, Artificial
  helical interface sequence
RVTYKNVPNWH

SEQ ID NO: 4856 - protein, 11 aa, Artificial
  helical interface sequence
PFICELAKAYV

SEQ ID NO: 4857 - protein, 7 aa, Artificial
  helical interface sequence
EEFAKFA

SEQ ID NO: 4858 - protein, 42 aa, Artificial; identical to SEQ ID NO: 1936
  helical interface sequence

SEQ ID NO: 4859 - protein, 16 aa, Artificial
  helical interface sequence
HEAVVKEAGDACFSKY

SEQ ID NO: 4860 - protein, 15 aa, Artificial
  helical interface sequence
EGVATYAAAVLFRMS

SEQ ID NO: 4861 - protein, 15 aa, Artificial
  helical interface sequence
DKKLAKLIDEVETLF

SEQ ID NO: 4862 - protein, 14 aa, Artificial
  helical interface sequence
DTQLQQIVDKTIIN

SEQ ID NO: 4863 - protein, 5 aa, Artificial
  helical interface sequence
PELQQ

SEQ ID NO: 4864 - protein, 27 aa, Artificial
  helical interface sequence
GAHNRTFLNAWTEHYLASSVAALKDFV

SEQ ID NO: 4865 - protein, 16 aa, Artificial
  helical interface sequence
DLIYSILTQIASDVYG

SEQ ID NO: 4866 - protein, 29 aa, Artificial
  helical interface sequence
PQVAARKILDALEYRTWKLGVHKEVAERY

SEQ ID NO: 4867 - protein, 7 aa, Artificial
  helical interface sequence
AQEVHRW

SEQ ID NO: 4868 - protein, 8 aa, Artificial
  helical interface sequence
TFLMEMLE

SEQ ID NO: 4869 - protein, 6 aa, Artificial
  helical interface sequence
LRVLRS

SEQ ID NO: 4870 - protein, 14 aa, Artificial
  helical interface sequence
YHAWQHRQWVIQEF

SEQ ID NO: 4871 - protein, 22 aa, Artificial
  helical interface sequence
ASLAMRVLETFDKVVAETLKDN

SEQ ID NO: 4872 - protein, 33 aa, Artificial; identical to SEQ ID NO: 3637
  helical interface sequence

SEQ ID NO: 4873 - protein, 12 aa, Artificial
  helical interface sequence
IFDIEEELKAQL

SEQ ID NO: 4874 - protein, 5 aa, Artificial
  helical interface sequence
LEWLN

SEQ ID NO: 4875 - protein, 5 aa, Artificial
  helical interface sequence
LEWLN

SEQ ID NO: 4876 - protein, 15 aa, Artificial
  helical interface sequence
ITDIVSSLQLQFESG

SEQ ID NO: 4877 - protein, 22 aa, Artificial
  helical interface sequence
VGDAQVLVRYMKAELELYRLQR

SEQ ID NO: 4878 - protein, 17 aa, Artificial
  helical interface sequence
KCVSIQYLEAVRRLKVE

SEQ ID NO: 4879 - protein, 9 aa, Artificial
  helical interface sequence
AYSYIREAW

SEQ ID NO: 4880 - protein, 22 aa, Artificial
  helical interface sequence
RQEVEVLREKMFLCLDEYCRRS

SEQ ID NO: 4881 - protein, 13 aa, Artificial
  helical interface sequence
TPDAHFFTEVRYK

SEQ ID NO: 4882 - protein, 8 aa, Artificial
  helical interface sequence
VAWRNRCK

SEQ ID NO: 4883 - protein, 9 aa, Artificial
  helical interface sequence
TDLLPNLRR

SEQ ID NO: 4884 - protein, 20 aa, Artificial
  helical interface sequence
VEEEVIKRELTEKVKEAVSK

SEQ ID NO: 4885 - protein, 12 aa, Artificial
  helical interface sequence
FQVEYALEAIKQ

SEQ ID NO: 4886 - protein, 31 aa, Artificial; identical to SEQ ID NO: 1463
  helical interface sequence

SEQ ID NO: 4887 - protein, 14 aa, Artificial
  helical interface sequence
AERIRAQIKYAIAQ

SEQ ID NO: 4888 - protein, 12 aa, Artificial
  helical interface sequence
SDLAEALYLVCG

SEQ ID NO: 4889 - protein, 6 aa, Artificial
  helical interface sequence
HTARLV

SEQ ID NO: 4890 - protein, 12 aa, Artificial
  helical interface sequence
WHLLRQEALLKE

SEQ ID NO: 4891 - protein, 14 aa, Artificial
  helical interface sequence
AKNYGRAVYECLRG

SEQ ID NO: 4892 - protein, 6 aa, Artificial
  helical interface sequence
PWTQRY

SEQ ID NO: 4893 - protein, 12 aa, Artificial
  helical interface sequence
IDEKVELYRLKF

SEQ ID NO: 4894 - protein, 5 aa, Artificial
  helical interface sequence
FAEMN

SEQ ID NO: 4895 - protein, 14 aa, Artificial
  helical interface sequence
DNGAKYLIDVLQKD

SEQ ID NO: 4896 - protein, 12 aa, Artificial
  helical interface sequence
FTMFLSIFSDKL

SEQ ID NO: 4897 - protein, 11 aa, Artificial
  helical interface sequence
FINCKKALETC

SEQ ID NO: 4898 - protein, 15 aa, Artificial
  helical interface sequence
SLEKQKGVTNLLIKY

SEQ ID NO: 4899 - protein, 19 aa, Artificial
  helical interface sequence
QTQLRQAVQLLTRTELTLK

SEQ ID NO: 4900 - protein, 15 aa, Artificial
  helical interface sequence
LLALAQALERLSLLW

SEQ ID NO: 4901 - protein, 18 aa, Artificial
  helical interface sequence
QDESGAAAIFTVQLDDYL

SEQ ID NO: 4902 - protein, 9 aa, Artificial
  helical interface sequence
DTFWDYVSL

SEQ ID NO: 4903 - protein, 17 aa, Artificial
  helical interface sequence
PFEQRHIVDGFSFELSK

SEQ ID NO: 4904 - protein, 21 aa, Artificial
  helical interface sequence
HTIAAFLGGAAAQEVIKIITK

SEQ ID NO: 4905 - protein, 7 aa, Artificial
  helical interface sequence
DRQLRLW

SEQ ID NO: 4906 - protein, 35 aa, Artificial; identical to SEQ ID NO: 2686
  helical interface sequence

SEQ ID NO: 4907 - protein, 16 aa, Artificial
  helical interface sequence
LSLALYVFDEYLQKTV

SEQ ID NO: 4908 - protein, 10 aa, Artificial
  helical interface sequence
YQVEYAFKAT

SEQ ID NO: 4909 - protein, 14 aa, Artificial
  helical interface sequence
QQRFTQVSDELFQG

SEQ ID NO: 4910 - protein, 10 aa, Artificial
  helical interface sequence
QTGQMTAGFL

SEQ ID NO: 4911 - protein, 16 aa, Artificial
  helical interface sequence
QGCVAYFRSYFNRHFR

SEQ ID NO: 4912 - protein, 21 aa, Artificial
  helical interface sequence
KRAKVTSAMQTMLFTMLRKLD

SEQ ID NO: 4913 - protein, 20 aa, Artificial
  helical interface sequence
EQNVHASMFCNAWQFLLKTG

SEQ ID NO: 4914 - protein, 26 aa, Artificial
  helical interface sequence
SRSLHFFLAAWPVVGVWFTALGISTM

SEQ ID NO: 4915 - protein, 17 aa, Artificial
  helical interface sequence
ITIPALFIAGWLFVSTG

SEQ ID NO: 4916 - protein, 30 aa, Artificial
  helical interface sequence
RDEVKQAIELAKKGALQIYEMQREAILRRY

SEQ ID NO: 4917 - protein, 18 aa, Artificial
  helical interface sequence
DENSIELARVVDRGIRES

SEQ ID NO: 4918 - protein, 14 aa, Artificial
  helical interface sequence
FPEFLTMMARKMKD

SEQ ID NO: 4919 - protein, 20 aa, Artificial
  helical interface sequence
KGESVCLDRCVSKYLDIHER

SEQ ID NO: 4920 - protein, 6 aa, Artificial
  helical interface sequence
KYVANQ

SEQ ID NO: 4921 - protein, 16 aa, Artificial
  helical interface sequence
YYGRWLLTAARILVDK

SEQ ID NO: 4922 - protein, 18 aa, Artificial
  helical interface sequence
LTELHNKIVEMRERVASG

SEQ ID NO: 4923 - protein, 10 aa, Artificial
  helical interface sequence
PNYRRRLVRW

SEQ ID NO: 4924 - protein, 16 aa, Artificial
  helical interface sequence
ADEFLPVLIYVTIKAN

SEQ ID NO: 4925 - protein, 18 aa, Artificial
  helical interface sequence
RGLFQTGQKGLNDFQCWE

SEQ ID NO: 4926 - protein, 12 aa, Artificial
  helical interface sequence
SREIQTAVRLLL

SEQ ID NO: 4927 - protein, 9 aa, Artificial
  helical interface sequence
VGYKLSFFG

SEQ ID NO: 4928 - protein, 22 aa, Artificial
  helical interface sequence
DLTKQLRLEENKKDRIKAAEFY

SEQ ID NO: 4929 - protein, 11 aa, Artificial
  helical interface sequence
AVIYHFKHYTE

SEQ ID NO: 4930 - protein, 10 aa, Artificial
  helical interface sequence
VIYHFKHYTE

SEQ ID NO: 4931 - protein, 28 aa, Artificial
  helical interface sequence
LMARKQAGFTAVMFLTVLSVLLYLTNKR

SEQ ID NO: 4932 - protein, 50 aa, Artificial
  helical interface sequence
VSLVQAQTNARAIAAMKNSIQATNRAVFEVKEGTQRLAIAVQAIQDHINT

SEQ ID NO: 4933 - protein, 17 aa, Artificial
  helical interface sequence
TLESDDGENMSSATYIN

SEQ ID NO: 4934 - protein, 15 aa, Artificial
  helical interface sequence
PATKSMIQREAIRTF

SEQ ID NO: 4935 - protein, 10 aa, Artificial
  helical interface sequence
DWAESTLMTQ

SEQ ID NO: 4936 - protein, 15 aa, Artificial
  helical interface sequence
MDKINNRFNYLFEVN

SEQ ID NO: 4937 - protein, 11 aa, Artificial
  helical interface sequence
LPLKERLAAFY

SEQ ID NO: 4938 - protein, 29 aa, Artificial
  helical interface sequence
LHWRAAGAATVLLVIVLLAGSYLAVLAER

SEQ ID NO: 4939 - protein, 13 aa, Artificial
  helical interface sequence
DDIRILRDIEQYY

SEQ ID NO: 4940 - protein, 11 aa, Artificial
  helical interface sequence
FKEQIYDVYRY

SEQ ID NO: 4941 - protein, 14 aa, Artificial
  helical interface sequence
FEDFVTALSILLRG

SEQ ID NO: 4942 - protein, 6 aa, Artificial
  helical interface sequence
YNVALE

SEQ ID NO: 4943 - protein, 11 aa, Artificial
  helical interface sequence
ELGRPDAEYWN

SEQ ID NO: 4944 - protein, 11 aa, Artificial
  helical interface sequence
VGEDIRKLDYG

SEQ ID NO: 4945 - protein, 14 aa, Artificial
  helical interface sequence
KGFKEQIYDVYRYL

SEQ ID NO: 4946 - protein, 23 aa, Artificial
  helical interface sequence
LHDQVHLLECAWLEILMIGLVWR

SEQ ID NO: 4947 - protein, 10 aa, Artificial
  helical interface sequence
VEQFWRFYSH

SEQ ID NO: 4948 - protein, 14 aa, Artificial
  helical interface sequence
RSTVAQLVKRLTDA

SEQ ID NO: 4949 - protein, 24 aa, Artificial
  helical interface sequence
LASLAIYSFWIFLAGLIYYLQTEN

SEQ ID NO: 4950 - protein, 16 aa, Artificial
  helical interface sequence
EAETKSTLMFGQRAKT

SEQ ID NO: 4951 - protein, 11 aa, Artificial
  helical interface sequence
PYQGRELAFKL

SEQ ID NO: 4952 - protein, 9 aa, Artificial
  helical interface sequence
IREAFRVFD

SEQ ID NO: 4953 - protein, 13 aa, Artificial
  helical interface sequence
SNKKFDQWYKEQY

SEQ ID NO: 4954 - protein, 15 aa, Artificial
  helical interface sequence
KTTIDQLHNSLNAAS

SEQ ID NO: 4955 - protein, 14 aa, Artificial
  helical interface sequence
IQSRFNYAWGLIKS

SEQ ID NO: 4956 - protein, 32 aa, Artificial; identical to SEQ ID NO: 462
  helical interface sequence

SEQ ID NO: 4957 - protein, 29 aa, Artificial
  helical interface sequence
GFMLRYLHANGASLFFIAVYLHIFRGLYY

SEQ ID NO: 4958 - protein, 16 aa, Artificial
  helical interface sequence
TDKDAEALFKCFRSLG

SEQ ID NO: 4959 - protein, 16 aa, Artificial
  helical interface sequence
SDEIGEQALSRMLVVY

SEQ ID NO: 4960 - protein, 12 aa, Artificial
  helical interface sequence
PLTDAVSTADSQ

SEQ ID NO: 4961 - protein, 27 aa, Artificial
  helical interface sequence
STEIQVAFGRFRQAAAGLSAATALTSA

SEQ ID NO: 4962 - protein, 19 aa, Artificial
  helical interface sequence
NKLFLDYTIKCYESFMSGA

SEQ ID NO: 4963 - protein, 25 aa, Artificial
  helical interface sequence
TRRYAACIRDMDYFLRYATYAMLAG

SEQ ID NO: 4964 - protein, 6 aa, Artificial
  helical interface sequence
PWTQRF

SEQ ID NO: 4965 - protein, 14 aa, Artificial
  helical interface sequence
IRNKIRAIGKMARV

SEQ ID NO: 4966 - protein, 15 aa, Artificial
  helical interface sequence
PHLLWEVVRWQLAKR

SEQ ID NO: 4967 - protein, 13 aa, Artificial
  helical interface sequence
GQIDYALTAVKQG

SEQ ID NO: 4968 - protein, 22 aa, Artificial
  helical interface sequence
IPDGRHLVNRGREEAASFKKLY

SEQ ID NO: 4969 - protein, 15 aa, Artificial
  helical interface sequence
QDDLIRAIKKLKALG

SEQ ID NO: 4970 - protein, 16 aa, Artificial
  helical interface sequence
MADVAQKLEQLEVMMS

SEQ ID NO: 4971 - protein, 20 aa, Artificial
  helical interface sequence
KILIFGLFEETALAAFLSYC

SEQ ID NO: 4972 - protein, 25 aa, Artificial
  helical interface sequence
SAVLVDVSKIITLTQEFRRHYDSVY

SEQ ID NO: 4973 - protein, 60 aa, Artificial; identical to SEQ ID NO: 2060
  helical interface sequence

SEQ ID NO: 4974 - protein, 13 aa, Artificial
  helical interface sequence
QSAWFYHRWLLGA

SEQ ID NO: 4975 - protein, 12 aa, Artificial
  helical interface sequence
TLELCYDLTMTY

SEQ ID NO: 4976 - protein, 24 aa, Artificial
  helical interface sequence
DACIDQCLAKYMRSWNVISKAYIS

SEQ ID NO: 4977 - protein, 15 aa, Artificial
  helical interface sequence
LGELPQGFARLSAIY

SEQ ID NO: 4978 - protein, 18 aa, Artificial
  helical interface sequence
KRAVRRLRTACERAKRTL

SEQ ID NO: 4979 - protein, 14 aa, Artificial
  helical interface sequence
DELLIESYFKAKEL

SEQ ID NO: 4980 - protein, 19 aa, Artificial
  helical interface sequence
PAVHASLDKFFSAVSTVLT

SEQ ID NO: 4981 - protein, 32 aa, Artificial
  helical interface sequence
PWQRLLLRFKILRSLQAFVAVAARVFAHGAAT

SEQ ID NO: 4982 - protein, 20 aa, Artificial
  helical interface sequence
FDNFISCLVRLDAMFRAFRS

SEQ ID NO: 4983 - protein, 10 aa, Artificial
  helical interface sequence
SNFWDYQISK

SEQ ID NO: 4984 - protein, 13 aa, Artificial
  helical interface sequence
GDFYEGINFAGAF

SEQ ID NO: 4985 - protein, 28 aa, Artificial
  helical interface sequence
EQCERARRLQAKMMTNLVMAKDRLQLLE

SEQ ID NO: 4986 - protein, 23 aa, Artificial
  helical interface sequence
LMPALMAVFQHVRTRIQSELDCQ

SEQ ID NO: 4987 - protein, 10 aa, Artificial
  helical interface sequence
GIALACKYNG

SEQ ID NO: 4988 - protein, 5 aa, Artificial
  helical interface sequence
TYYMS

SEQ ID NO: 4989 - protein, 17 aa, Artificial
  helical interface sequence
AQVPLGAGIALACKYNG

SEQ ID NO: 4990 - protein, 15 aa, Artificial
  helical interface sequence
FTQILSTVEPKALEM

SEQ ID NO: 4991 - protein, 14 aa, Artificial
  helical interface sequence
WKFLKTVVNKLFEF

SEQ ID NO: 4992 - protein, 19 aa, Artificial
  helical interface sequence
QTQLRQAVQLLTRTELTLK

SEQ ID NO: 4993 - protein, 10 aa, Artificial
  helical interface sequence
KYERARILGT

SEQ ID NO: 4994 - protein, 6 aa, Artificial
  helical interface sequence
LYKMRT

SEQ ID NO: 4995 - protein, 54 aa, Artificial
  helical interface sequence
DENLEQVSGIIGNLRHMALDMGNEIDTQNRQIDRIMEKADSNKTRIDEANQRAT

SEQ ID NO: 4996 - protein, 12 aa, Artificial
  helical interface sequence
GPAVITRATVHC

SEQ ID NO: 4997 - protein, 21 aa, Artificial
  helical interface sequence
GEPALIPMIPAVVAAIEDALG

SEQ ID NO: 4998 - protein, 8 aa, Artificial
  helical interface sequence
RQQYAESY

SEQ ID NO: 4999 - protein, 10 aa, Artificial
  helical interface sequence
RSERKKWIHC

SEQ ID NO: 5000 - protein, 19 aa, Artificial
  helical interface sequence
ELAKHAVSEGTKAVTKYTS

SEQ ID NO: 5001 - protein, 8 aa, Artificial
  helical interface sequence
HIQYLRES

SEQ ID NO: 5002 - protein, 12 aa, Artificial
  helical interface sequence
EIDQLFRIFRTL

SEQ ID NO: 5003 - protein, 7 aa, Artificial
  helical interface sequence
SQLRDLD

SEQ ID NO: 5004 - protein, 5 aa, Artificial
  helical interface sequence
ECENG

SEQ ID NO: 5005 - protein, 17 aa, Artificial
  helical interface sequence
KKIWETVCPTVEPWAKK

SEQ ID NO: 5006 - protein, 9 aa, Artificial
  helical interface sequence
RDWAESTLM

SEQ ID NO: 5007 - protein, 5 aa, Artificial
  helical interface sequence
PWEAF

SEQ ID NO: 5008 - protein, 33 aa, Artificial; identical to SEQ ID NO: 3084
  helical interface sequence

SEQ ID NO: 5009 - protein, 12 aa, Artificial
  helical interface sequence
FQVEYAVKAVEN

SEQ ID NO: 5010 - protein, 16 aa, Artificial
  helical interface sequence
QGCVAYFRSYFNRHFR

SEQ ID NO: 5011 - protein, 48 aa, Artificial; identical to SEQ ID NO: 583
  helical interface sequence

SEQ ID NO: 5012 - protein, 12 aa, Artificial
  helical interface sequence
PLTEAVSVADSQ

SEQ ID NO: 5013 - protein, 27 aa, Artificial
  helical interface sequence
STEIQVAFGRFRQAKAGLEAAKALTSK

SEQ ID NO: 5014 - protein, 7 aa, Artificial
  helical interface sequence
DTLMQRL

SEQ ID NO: 5015 - protein, 5 aa, Artificial
  helical interface sequence
LQQWG

SEQ ID NO: 5016 - protein, 10 aa, Artificial
  helical interface sequence
YCCRRMILTH

SEQ ID NO: 5017 - protein, 18 aa, Artificial
  helical interface sequence
TRVRVAALQNLVKIMSLY

SEQ ID NO: 5018 - protein, 11 aa, Artificial
  helical interface sequence
DDIEELMKDGD

SEQ ID NO: 5019 - protein, 7 aa, Artificial
  helical interface sequence
RPLWRHY

SEQ ID NO: 5020 - protein, 9 aa, Artificial
  helical interface sequence
RPDAEYWNS

SEQ ID NO: 5021 - protein, 15 aa, Artificial
  helical interface sequence
PVLQQHFRNLEALAL

SEQ ID NO: 5022 - protein, 22 aa, Artificial
  helical interface sequence
PQGGLQNIATGKHNLEILTKRS

SEQ ID NO: 5023 - protein, 7 aa, Artificial
  helical interface sequence
LEKIFSE

SEQ ID NO: 5024 - protein, 12 aa, Artificial
  helical interface sequence
GHQIVDLINNAF

SEQ ID NO: 5025 - protein, 27 aa, Artificial
  helical interface sequence
LHELMRAWELVHRVWTAEAHVRHMLFR

SEQ ID NO: 5026 - protein, 8 aa, Artificial
  helical interface sequence
LLELLRAE

SEQ ID NO: 5027 - protein, 9 aa, Artificial
  helical interface sequence
PVQQAMIDH

SEQ ID NO: 5028 - protein, 15 aa, Artificial
  helical interface sequence
KKQVLRMEHLVLKVL

SEQ ID NO: 5029 - protein, 23 aa, Artificial
  helical interface sequence
PAEVEALREKVYASLEAYCKHKY

SEQ ID NO: 5030 - protein, 21 aa, Artificial
  helical interface sequence
IQDLEKYVEDTKIDLWSYNAE

SEQ ID NO: 5031 - protein, 6 aa, Artificial
  helical interface sequence
VDRVSV

SEQ ID NO: 5032 - protein, 29 aa, Artificial
  helical interface sequence
SKAMSIMNSFVNDVFERIAGEASRLAHYN

SEQ ID NO: 5033 - protein, 5 aa, Artificial
  helical interface sequence
FDDLI

SEQ ID NO: 5034 - protein, 17 aa, Artificial
  helical interface sequence
YREYGRRLVMSIRRSAL

SEQ ID NO: 5035 - protein, 16 aa, Artificial
  helical interface sequence
AHCASSRQIISHWKNC

SEQ ID NO: 5036 - protein, 18 aa, Artificial
  helical interface sequence
ENVLLKELELVQNAFFTD

SEQ ID NO: 5037 - protein, 15 aa, Artificial
  helical interface sequence
VKIRIESTVAGSLRS

SEQ ID NO: 5038 - protein, 15 aa, Artificial
  helical interface sequence
DKKLAKLIDEVETLF

SEQ ID NO: 5039 - protein, 18 aa, Artificial
  helical interface sequence
KVEILRNAIRYIEGLQAL

SEQ ID NO: 5040 - protein, 9 aa, Artificial
  helical interface sequence
EAVEQLLEE

SEQ ID NO: 5041 - protein, 30 aa, Artificial; identical to SEQ ID NO: 2910
  helical interface sequence

SEQ ID NO: 5042 - protein, 12 aa, Artificial
  helical interface sequence
DEEVDEMIREAD

SEQ ID NO: 5043 - protein, 17 aa, Artificial
  helical interface sequence
YCTPGMIMRSHRLLQEN

SEQ ID NO: 5044 - protein, 19 aa, Artificial
  helical interface sequence
FWESDDNDNMETASQNGKK

SEQ ID NO: 5045 - protein, 9 aa, Artificial
  helical interface sequence
YEVWIGFFA

SEQ ID NO: 5046 - protein, 15 aa, Artificial
  helical interface sequence
EEASKLKERIWIGLN

SEQ ID NO: 5047 - protein, 17 aa, Artificial
  helical interface sequence
AQVPLGAGIALACKYNG

SEQ ID NO: 5048 - protein, 11 aa, Artificial
  helical interface sequence
IEDQISLLKGA

SEQ ID NO: 5049 - protein, 14 aa, Artificial
  helical interface sequence
EDMIVDVALDLLAA

SEQ ID NO: 5050 - protein, 21 aa, Artificial
  helical interface sequence
FEEFKYLWNNIKKWQAIYKQF

SEQ ID NO: 5051 - protein, 8 aa, Artificial
  helical interface sequence
SSLDIVLH

SEQ ID NO: 5052 - protein, 14 aa, Artificial
  helical interface sequence
NPILWRYRQYINSG

SEQ ID NO: 5053 - protein, 10 aa, Artificial
  helical interface sequence
FRLVRLLRFL

SEQ ID NO: 5054 - protein, 10 aa, Artificial
  helical interface sequence
WTILNEIISM

SEQ ID NO: 5055 - protein, 29 aa, Artificial
  helical interface sequence
QSFLLKCLEQVRKIQGDGAALQEKLCATY

SEQ ID NO: 5056 - protein, 13 aa, Artificial
  helical interface sequence
NPILWRARQYINS

SEQ ID NO: 5057 - protein, 6 aa, Artificial
  helical interface sequence
YPRIEA

SEQ ID NO: 5058 - protein, 25 aa, Artificial
  helical interface sequence
TKPVLRALKRMLAMRHYKRAETVDG

SEQ ID NO: 5059 - protein, 5 aa, Artificial
  helical interface sequence
VEYLT

SEQ ID NO: 5060 - protein, 22 aa, Artificial
  helical interface sequence
YNEFENLRRAGIVHADMRGYSY

SEQ ID NO: 5061 - protein, 31 aa, Artificial
  helical interface sequence
MNKRNIMNLILAGGAGLPITTLALGYGAFFV

SEQ ID NO: 5062 - protein, 10 aa, Artificial
  helical interface sequence
AHFFTEVRYK

SEQ ID NO: 5063 - protein, 29 aa, Artificial
  helical interface sequence
RRIENLNKKVDDGFLDIWTYNAELLVLLE

SEQ ID NO: 5064 - protein, 16 aa, Artificial
  helical interface sequence
KIEDKVTLSKIAQELS

SEQ ID NO: 5065 - protein, 53 aa, Artificial; identical to SEQ ID NO: 171
  helical interface sequence

SEQ ID NO: 5066 - protein, 15 aa, Artificial
  helical interface sequence
IFYAELARGIEDIAT

SEQ ID NO: 5067 - protein, 20 aa, Artificial
  helical interface sequence
SKLRGHSITLMYALQNFVDA

SEQ ID NO: 5068 - protein, 12 aa, Artificial
  helical interface sequence
AFSSVTHICRDV

SEQ ID NO: 5069 - protein, 8 aa, Artificial
  helical interface sequence
RDEVREVM

SEQ ID NO: 5070 - protein, 8 aa, Artificial
  helical interface sequence
ERELLESY

SEQ ID NO: 5071 - protein, 5 aa, Artificial
  helical interface sequence
PLVKG

SEQ ID NO: 5072 - protein, 14 aa, Artificial
  helical interface sequence
YHAWQHRQWVIQEF

SEQ ID NO: 5073 - protein, 31 aa, Artificial
  helical interface sequence
LQTELDVSEQVQRDFVKLSQTLQVQLERIRQ

SEQ ID NO: 5074 - protein, 15 aa, Artificial
  helical interface sequence
EEMKEEYRQQTLRTF

SEQ ID NO: 5075 - protein, 8 aa, Artificial
  helical interface sequence
FSMRVSAR

SEQ ID NO: 5076 - protein, 29 aa, Artificial
  helical interface sequence
TLLMIGLTTNMLTMYQWWRDVIRESTFQG

SEQ ID NO: 5077 - protein, 30 aa, Artificial
  helical interface sequence
HKDIGTLYLLFGAWAGMVGTALSLLIRAEL

SEQ ID NO: 5078 - protein, 32 aa, Artificial; identical to SEQ ID NO: 1282
  helical interface sequence

SEQ ID NO: 5079 - protein, 10 aa, Artificial
  helical interface sequence
VVRWQLAKRR

SEQ ID NO: 5080 - protein, 13 aa, Artificial
  helical interface sequence
HEDIHTYLREMEV

SEQ ID NO: 5081 - protein, 6 aa, Artificial
  helical interface sequence
VEILFE

SEQ ID NO: 5082 - protein, 8 aa, Artificial
  helical interface sequence
YNPIYRAG

SEQ ID NO: 5083 - protein, 22 aa, Artificial
  helical interface sequence
VWSCVPATIYCNNAQLAPYQRT

SEQ ID NO: 5084 - protein, 28 aa, Artificial
  helical interface sequence
PADLELLQELNRTCRAMQQRVLELIPQI

SEQ ID NO: 5085 - protein, 9 aa, Artificial
  helical interface sequence
DRLRPLSYP

SEQ ID NO: 5086 - protein, 21 aa, Artificial
  helical interface sequence
LSEARLVIKEALVERRRAFKR

SEQ ID NO: 5087 - protein, 11 aa, Artificial
  helical interface sequence
FQVEYAREAVK

SEQ ID NO: 5088 - protein, 23 aa, Artificial
  helical interface sequence
VGDAQVLVRYMKAELELYRLQRR

SEQ ID NO: 5089 - protein, 9 aa, Artificial
  helical interface sequence
DTFWDYVSL

SEQ ID NO: 5090 - protein, 21 aa, Artificial
  helical interface sequence
DRKVAMGFLAATILIVVMAMS

SEQ ID NO: 5091 - protein, 14 aa, Artificial
  helical interface sequence
LVPGAIILDTVLML

SEQ ID NO: 5092 - protein, 6 aa, Artificial
  helical interface sequence
PHQWQK

SEQ ID NO: 5093 - protein, 21 aa, Artificial
  helical interface sequence
ASTNAVIAAVCATEVFKIATS

SEQ ID NO: 5094 - protein, 30 aa, Artificial
  helical interface sequence
LPMAMSITHRGTGVALSLGVSLFSLAALLL

SEQ ID NO: 5095 - protein, 16 aa, Artificial
  helical interface sequence
LSLALYVFDEYLQKTV

SEQ ID NO: 5096 - protein, 14 aa, Artificial
  helical interface sequence
YSGFYTFSLLDHHY

SEQ ID NO: 5097 - protein, 12 aa, Artificial
  helical interface sequence
ARSDLLSAIRQG

SEQ ID NO: 5098 - protein, 13 aa, Artificial
  helical interface sequence
ENGQNLIRVMAEN

SEQ ID NO: 5099 - protein, 11 aa, Artificial
  helical interface sequence
TVEYFTSQQVT

SEQ ID NO: 5100 - protein, 11 aa, Artificial
  helical interface sequence
IEVGEEMDEIT

SEQ ID NO: 5101 - protein, 15 aa, Artificial
  helical interface sequence
EDLKRRVADAVQRSI

SEQ ID NO: 5102 - protein, 26 aa, Artificial
  helical interface sequence
LQDIDQAENTARSTAVKLLEELKKHL

SEQ ID NO: 5103 - protein, 17 aa, Artificial
  helical interface sequence
SHVLSKVCMYFTYKVRY

SEQ ID NO: 5104 - protein, 23 aa, Artificial
  helical interface sequence
KIMKVIRKNIVKKLIEAFNEIAE

SEQ ID NO: 5105 - protein, 17 aa, Artificial
  helical interface sequence
LTELHNKIVEMRERVAS

SEQ ID NO: 5106 - protein, 13 aa, Artificial
  helical interface sequence
LEELYKMSRSEGF

SEQ ID NO: 5107 - protein, 12 aa, Artificial
  helical interface sequence
AELVDALQFVCG

SEQ ID NO: 5108 - protein, 18 aa, Artificial
  helical interface sequence
AFDLDVVKLTAQFVARNG

SEQ ID NO: 5109 - protein, 15 aa, Artificial
  helical interface sequence
IREEVHRHLGTVALM

SEQ ID NO: 5110 - protein, 18 aa, Artificial
  helical interface sequence
LTELHNKIVEMRERVASG

SEQ ID NO: 5111 - protein, 17 aa, Artificial
  helical interface sequence
SSIREEVHRHLGTVALM

SEQ ID NO: 5112 - protein, 10 aa, Artificial
  helical interface sequence
PNYRRRLVRW

SEQ ID NO: 5113 - protein, 11 aa, Artificial
  helical interface sequence
EPLLLRVLAEL

SEQ ID NO: 5114 - protein, 38 aa, Artificial; identical to SEQ ID NO: 708
  helical interface sequence

SEQ ID NO: 5115 - protein, 14 aa, Artificial
  helical interface sequence
RIRYVLSSYLRCRL

SEQ ID NO: 5116 - protein, 6 aa, Artificial
  helical interface sequence
NALRFH

SEQ ID NO: 5117 - protein, 10 aa, Artificial
  helical interface sequence
LWLAINLKQR

SEQ ID NO: 5118 - protein, 30 aa, Artificial
  helical interface sequence
LPMAMSITHRGTGVALSLGVSLFSVAALLL

SEQ ID NO: 5119 - protein, 10 aa, Artificial
  helical interface sequence
VGYKLSFFGD

SEQ ID NO: 5120 - protein, 23 aa, Artificial
  helical interface sequence
KESTQKAIDGVTNKVNSIIDKMN

SEQ ID NO: 5121 - protein, 18 aa, Artificial
  helical interface sequence
AEWEAKILELAGFLDSYI

SEQ ID NO: 5122 - protein, 30 aa, Artificial
  helical interface sequence
SSIRYLQEIYNSNNQKIVNLKEKVAQLEAQ

SEQ ID NO: 5123 - protein, 16 aa, Artificial
  helical interface sequence
QASDSAYQFAKAALEK

SEQ ID NO: 5124 - protein, 14 aa, Artificial
  helical interface sequence
KRKVDWLTEKMREA

SEQ ID NO: 5125 - protein, 7 aa, Artificial
  helical interface sequence
GDFANGA

SEQ ID NO: 5126 - protein, 12 aa, Artificial
  helical interface sequence
VFYLHSRLLERA

SEQ ID NO: 5127 - protein, 19 aa, Artificial
  helical interface sequence
AAMVFEFLYKMCDVMAAYF

SEQ ID NO: 5128 - protein, 10 aa, Artificial
  helical interface sequence
ERVKRGMAEM

SEQ ID NO: 5129 - protein, 16 aa, Artificial
  helical interface sequence
EEVIQKGHRKAREFEK

SEQ ID NO: 5130 - protein, 21 aa, Artificial
  helical interface sequence
DQAQGKVHSLMEKDSYPRFLR

SEQ ID NO: 5131 - protein, 9 aa, Artificial
  helical interface sequence
DRLRPLSYP

SEQ ID NO: 5132 - protein, 17 aa, Artificial
  helical interface sequence
DSEFKHALARNLRSLTR

SEQ ID NO: 5133 - protein, 6 aa, Artificial
  helical interface sequence
GKISEI

SEQ ID NO: 5134 - protein, 12 aa, Artificial
  helical interface sequence
PREMLCLVWASK

SEQ ID NO: 5135 - protein, 27 aa, Artificial
  helical interface sequence
EDGLRQVLEEMKALYEQNQSDVNEAKS

SEQ ID NO: 5136 - protein, 26 aa, Artificial
  helical interface sequence
EDGLRQVLEEMKALYEQNQSDVNEAK

SEQ ID NO: 5137 - protein, 11 aa, Artificial
  helical interface sequence
VSDKRDISRFL

SEQ ID NO: 5138 - protein, 16 aa, Artificial
  helical interface sequence
SDEIGEQALSRMLVVY

SEQ ID NO: 5139 - protein, 18 aa, Artificial
  helical interface sequence
IEDVKNAIGVLIGGLEWN

SEQ ID NO: 5140 - protein, 35 aa, Artificial; identical to SEQ ID NO: 1208
  helical interface sequence

SEQ ID NO: 5141 - protein, 12 aa, Artificial
  helical interface sequence
PLTDAVSTADSQ

SEQ ID NO: 5142 - protein, 34 aa, Artificial
  helical interface sequence
AATTVLRQLDMELVSVKRQIQNIKQTNSALKEKL

SEQ ID NO: 5143 - protein, 10 aa, Artificial
  helical interface sequence
RLSRLLSYAG

SEQ ID NO: 5144 - protein, 16 aa, Artificial
  helical interface sequence
TPQLEEIFFELTHNLN

SEQ ID NO: 5145 - protein, 9 aa, Artificial
  helical interface sequence
NVLQLKLQQ

SEQ ID NO: 5146 - protein, 14 aa, Artificial
  helical interface sequence
YFLQISRVNDLNRM

SEQ ID NO: 5147 - protein, 16 aa, Artificial
  helical interface sequence
AGEYGAEAYERMFLSF

SEQ ID NO: 5148 - protein, 16 aa, Artificial
  helical interface sequence
IRNKIRAIGKMARVFS

SEQ ID NO: 5149 - protein, 15 aa, Artificial
  helical interface sequence
EEQIAEFKEAFSLFD

SEQ ID NO: 5150 - protein, 6 aa, Artificial
  helical interface sequence
FAYVMA

SEQ ID NO: 5151 - protein, 11 aa, Artificial
  helical interface sequence
EMERDCLIGFG

SEQ ID NO: 5152 - protein, 16 aa, Artificial
  helical interface sequence
RTSQSGYMQRRLINAL

SEQ ID NO: 5153 - protein, 17 aa, Artificial
  helical interface sequence
AQTCAFWNRFLPKLLSA

SEQ ID NO: 5154 - protein, 22 aa, Artificial
  helical interface sequence
IPDARNAALRAKAEAAEFRYKY

SEQ ID NO: 5155 - protein, 13 aa, Artificial
  helical interface sequence
GQIDYALTAVKQG

SEQ ID NO: 5156 - protein, 31 aa, Artificial
  helical interface sequence
PRSWLATSHFVLAFFFLVGHLWHAGRARAAA

SEQ ID NO: 5157 - protein, 11 aa, Artificial
  helical interface sequence
IDNSVLKVVTN

SEQ ID NO: 5158 - protein, 60 aa, Artificial; identical to SEQ ID NO: 2781
  helical interface sequence

SEQ ID NO: 5159 - protein, 20 aa, Artificial
  helical interface sequence
KQKVQMSIHQFTNICFKKCV

SEQ ID NO: 5160 - protein, 8 aa, Artificial
  helical interface sequence
LPGLFDGG

SEQ ID NO: 5161 - protein, 11 aa, Artificial
  helical interface sequence
SWIQSEFNKAC

SEQ ID NO: 5162 - protein, 18 aa, Artificial
  helical interface sequence
PWVLLNASWFNSFLTHAL

SEQ ID NO: 5163 - protein, 8 aa, Artificial
  helical interface sequence
EYVEMLDR

SEQ ID NO: 5164 - protein, 7 aa, Artificial
  helical interface sequence
YNRIRSG

SEQ ID NO: 5165 - protein, 20 aa, Artificial
  helical interface sequence
DTEVERAKSLLKLQLGQLYE

SEQ ID NO: 5166 - protein, 31 aa, Artificial
  helical interface sequence
YIKLQNVYREKAKKDAAAVGNHVAKLLQSIG

SEQ ID NO: 5167 - protein, 20 aa, Artificial
  helical interface sequence
VNQAKQMLYDYVERKRKENS

SEQ ID NO: 5168 - protein, 22 aa, Artificial
  helical interface sequence
SVGTSVASAEQDELSQRLARLR

SEQ ID NO: 5169 - protein, 14 aa, Artificial
  helical interface sequence
LDTVELVMALEEEF

SEQ ID NO: 5170 - protein, 16 aa, Artificial
  helical interface sequence
FEQDDGENWVEIQHIL

SEQ ID NO: 5171 - protein, 7 aa, Artificial
  helical interface sequence
FDSIAKM

SEQ ID NO: 5172 - protein, 17 aa, Artificial
  helical interface sequence
AQVPLGAGIALACKYNG

SEQ ID NO: 5173 - protein, 15 aa, Artificial
  helical interface sequence
PVRQAEDVNLLDQMS

SEQ ID NO: 5174 - protein, 14 aa, Artificial
  helical interface sequence
EVGGEALGRLLVVY

SEQ ID NO: 5175 - protein, 15 aa, Artificial
  helical interface sequence
DTCKKYRSAYITPCT

SEQ ID NO: 5176 - protein, 14 aa, Artificial
  helical interface sequence
IRESIAEADADIAS

SEQ ID NO: 5177 - protein, 15 aa, Artificial
  helical interface sequence
PEVKRRIMLGTFALS

SEQ ID NO: 5178 - protein, 13 aa, Artificial
  helical interface sequence
GEYRRRWKREVLG

SEQ ID NO: 5179 - protein, 5 aa, Artificial
  helical interface sequence
EEFGR

SEQ ID NO: 5180 - protein, 32 aa, Artificial; identical to SEQ ID NO: 990
  helical interface sequence

SEQ ID NO: 5181 - protein, 12 aa, Artificial
  helical interface sequence
IVTKSIVNADAE

SEQ ID NO: 5182 - protein, 13 aa, Artificial
  helical interface sequence
TAALEKLKSYFST

SEQ ID NO: 5183 - protein, 14 aa, Artificial
  helical interface sequence
RERLELCDERVSSR

SEQ ID NO: 5184 - protein, 6 aa, Artificial
  helical interface sequence
ILHRLL

SEQ ID NO: 5185 - protein, 6 aa, Artificial
  helical interface sequence
ILHRLL

SEQ ID NO: 5186 - protein, 19 aa, Artificial
  helical interface sequence
DKEYQIMRNASMAVLREIG

SEQ ID NO: 5187 - protein, 23 aa, Artificial
  helical interface sequence
AAYLDDLRSKFLLENSVLKMEYA

SEQ ID NO: 5188 - protein, 17 aa, Artificial
  helical interface sequence
IKDYMLDRINGVYGADA

SEQ ID NO: 5189 - protein, 23 aa, Artificial
  helical interface sequence
FFMEVAKLRAARMLWAKLVHQFG

SEQ ID NO: 5190 - protein, 6 aa, Artificial
  helical interface sequence
MMELAE

SEQ ID NO: 5191 - protein, 8 aa, Artificial
  helical interface sequence
REFLLDFQ

SEQ ID NO: 5192 - protein, 10 aa, Artificial
  helical interface sequence
PLWKGMKRVF

SEQ ID NO: 5193 - protein, 21 aa, Artificial
  helical interface sequence
AKEYARMEAVKDERQFGSLQD

SEQ ID NO: 5194 - protein, 18 aa, Artificial
  helical interface sequence
VEILVRRLSDIKQGYTQH

SEQ ID NO: 5195 - protein, 13 aa, Artificial
  helical interface sequence
FQVEYALEAVKRG

SEQ ID NO: 5196 - protein, 31 aa, Artificial; identical to SEQ ID NO: 930
  helical interface sequence

SEQ ID NO: 5197 - protein, 15 aa, Artificial
  helical interface sequence
QRYGRELRRMSDEFV

SEQ ID NO: 5198 - protein, 11 aa, Artificial
  helical interface sequence
VPERAQQWYAQ

SEQ ID NO: 5199 - protein, 14 aa, Artificial
  helical interface sequence
DHEDMIGMFESWWH

SEQ ID NO: 5200 - protein, 9 aa, Artificial
  helical interface sequence
ASFLKERLM

SEQ ID NO: 5201 - protein, 20 aa, Artificial
  helical interface sequence
WRDRFLFVAEAIYKAQAETG

SEQ ID NO: 5202 - protein, 23 aa, Artificial
  helical interface sequence
AADTDMTTQLISSNLELHSLSTG

SEQ ID NO: 5203 - protein, 12 aa, Artificial
  helical interface sequence
EEELSDLFRMFD

SEQ ID NO: 5204 - protein, 8 aa, Artificial
  helical interface sequence
ERELLESY

SEQ ID NO: 5205 - protein, 25 aa, Artificial
  helical interface sequence
FKTYVDQACRAAEEFVNVYYTTMDK

SEQ ID NO: 5206 - protein, 21 aa, Artificial
  helical interface sequence
IQDLEKYVEDTKIDLWSYNAE

SEQ ID NO: 5207 - protein, 17 aa, Artificial
  helical interface sequence
SIPTICDLARTFAREMG

SEQ ID NO: 5208 - protein, 45 aa, Artificial
  helical interface sequence
ELEEIQQQCNQVTDDSLESTRRMLNMCEESKEAGIRTLVMLDEQG

SEQ ID NO: 5209 - protein, 29 aa, Artificial
  helical interface sequence
IGNLRNMAIDMGNEIGSQNRQVDRIQQKA

SEQ ID NO: 5210 - protein, 11 aa, Artificial
  helical interface sequence
EELLRALDQVN

SEQ ID NO: 5211 - protein, 15 aa, Artificial
  helical interface sequence
VSATDEFIMALSEAT

SEQ ID NO: 5212 - protein, 13 aa, Artificial
  helical interface sequence
PHFMPCLTRFLDG

SEQ ID NO: 5213 - protein, 43 aa, Artificial; identical to SEQ ID NO: 26
  helical interface sequence

SEQ ID NO: 5214 - protein, 29 aa, Artificial
  helical interface sequence
RKHMLQALFITITLGVYFTLLQASEYYEA

SEQ ID NO: 5215 - protein, 40 aa, Artificial; identical to SEQ ID NO: 4078
  helical interface sequence

SEQ ID NO: 5216 - protein, 28 aa, Artificial
  helical interface sequence
KWRLLAMMTLFFGSGFAAPFFIVRHQLL

SEQ ID NO: 5217 - protein, 40 aa, Artificial; identical to SEQ ID NO: 4078
  helical interface sequence

SEQ ID NO: 5218 - protein, 29 aa, Artificial
  helical interface sequence
MSTAISVLLAQAVFLLLTSQRLPETALAV

SEQ ID NO: 5219 - protein, 11 aa, Artificial
  helical interface sequence
VPERAQQWYAQ

SEQ ID NO: 5220 - protein, 8 aa, Artificial
  helical interface sequence
ALLRYLLD

SEQ ID NO: 5221 - protein, 22 aa, Artificial
  helical interface sequence
YNEFENLRRAGIVHADMRGYSY

SEQ ID NO: 5222 - protein, 22 aa, Artificial
  helical interface sequence
YNEFENLRRAGIVHADMRGYSY

SEQ ID NO: 5223 - protein, 5 aa, Artificial
  helical interface sequence
TVPFI

SEQ ID NO: 5224 - protein, 23 aa, Artificial
  helical interface sequence
TLVPVLILVAIGAFSLPILFRSQ

SEQ ID NO: 5225 - protein, 11 aa, Artificial
  helical interface sequence
FTMFLSIFSDK

SEQ ID NO: 5226 - protein, 14 aa, Artificial
  helical interface sequence
MQQLLKDLLTAYKF

SEQ ID NO: 5227 - protein, 13 aa, Artificial
  helical interface sequence
KAEVAAEFLNDRV

SEQ ID NO: 5228 - protein, 10 aa, Artificial
  helical interface sequence
KEYTNIFLKF

SEQ ID NO: 5229 - protein, 15 aa, Artificial
  helical interface sequence
QSVMEELKRIIIDSE

SEQ ID NO: 5230 - protein, 15 aa, Artificial
  helical interface sequence
PYSNQIEREELILKY

SEQ ID NO: 5231 - protein, 22 aa, Artificial
  helical interface sequence
APDARVLSNYLRQQCNYSSLVF

SEQ ID NO: 5232 - protein, 20 aa, Artificial
  helical interface sequence
SKLRGHSITLMYALQNFVDA

SEQ ID NO: 5233 - protein, 10 aa, Artificial
  helical interface sequence
NALEKEVESM

SEQ ID NO: 5234 - protein, 16 aa, Artificial
  helical interface sequence
DQIQGSAVIGAIKASF

SEQ ID NO: 5235 - protein, 5 aa, Artificial
  helical interface sequence
PLVKG

SEQ ID NO: 5236 - protein, 33 aa, Artificial
  helical interface sequence
RPDAEYYNKQYLERTRAELDTVCRYNYEETEVP

SEQ ID NO: 5237 - protein, 14 aa, Artificial
  helical interface sequence
AKNYGRAVYECLRG

SEQ ID NO: 5238 - protein, 14 aa, Artificial
  helical interface sequence
DEQIAAQVDYIVAN

SEQ ID NO: 5239 - protein, 30 aa, Artificial; identical to SEQ ID NO: 5077
  helical interface sequence

SEQ ID NO: 5240 - protein, 18 aa, Artificial
  helical interface sequence
KLQLVGTAAMLLASKFEE

SEQ ID NO: 5241 - protein, 17 aa, Artificial
  helical interface sequence
LQLVGTAAMLLASKFEE

SEQ ID NO: 5242 - protein, 9 aa, Artificial
  helical interface sequence
HWKNQFDHY

SEQ ID NO: 5243 - protein, 8 aa, Artificial
  helical interface sequence
YNPIYRAG

SEQ ID NO: 5244 - protein, 21 aa, Artificial
  helical interface sequence
RLPALRSIGLKCLEHLFFFKL

SEQ ID NO: 5245 - protein, 15 aa, Artificial
  helical interface sequence
SLEKQKGVTNLLIKY

SEQ ID NO: 5246 - protein, 7 aa, Artificial
  helical interface sequence
ALLRYLL

SEQ ID NO: 5247 - protein, 8 aa, Artificial
  helical interface sequence
ERELLESY

SEQ ID NO: 5248 - protein, 8 aa, Artificial
  helical interface sequence
RKKWIHCF

SEQ ID NO: 5249 - protein, 13 aa, Artificial
  helical interface sequence
FHRRELWEAIEAG

SEQ ID NO: 5250 - protein, 19 aa, Artificial
  helical interface sequence
PLLQQIHNITSFIRQAKAA

SEQ ID NO: 5251 - protein, 35 aa, Artificial
  helical interface sequence
PEIAQYLEEEFIEDHAEKIRTLAGHTSDLKKFITA

SEQ ID NO: 5252 - protein, 16 aa, Artificial
  helical interface sequence
LSLALYVFDEYLQKTV

SEQ ID NO: 5253 - protein, 48 aa, Artificial; identical to SEQ ID NO: 1509
  helical interface sequence

SEQ ID NO: 5254 - protein, 23 aa, Artificial
  helical interface sequence
FRLVRLLRFLRILLIISRGSKFL

SEQ ID NO: 5255 - protein, 26 aa, Artificial
  helical interface sequence
SRSLHFFLAAWPVVGVWFTALGISTM

SEQ ID NO: 5256 - protein, 7 aa, Artificial
  helical interface sequence
WELSYRL

SEQ ID NO: 5257 - protein, 17 aa, Artificial
  helical interface sequence
PRDLISNINVIVLELKG

SEQ ID NO: 5258 - protein, 8 aa, Artificial
  helical interface sequence
ERELLESY

SEQ ID NO: 5259 - protein, 22 aa, Artificial
  helical interface sequence
INEEIHTQFLDHLLTGIEDICG

SEQ ID NO: 5260 - protein, 12 aa, Artificial
  helical interface sequence
MEALVETKRVVK

SEQ ID NO: 5261 - protein, 26 aa, Artificial
  helical interface sequence
LQDIDQAENTARSTAVKLLEELKKHL

SEQ ID NO: 5262 - protein, 8 aa, Artificial
  helical interface sequence
SACHRKCV

SEQ ID NO: 5263 - protein, 27 aa, Artificial
  helical interface sequence
NGELQSINGRYQRATASLEAARSLTSN

SEQ ID NO: 5264 - protein, 18 aa, Artificial
  helical interface sequence
LTELHNKIVEMRERVASG

SEQ ID NO: 5265 - protein, 5 aa, Artificial
  helical interface sequence
DRLRP

SEQ ID NO: 5266 - protein, 5 aa, Artificial
  helical interface sequence
PVDYL

SEQ ID NO: 5267 - protein, 10 aa, Artificial
  helical interface sequence
PNYRRRLVRW

SEQ ID NO: 5268 - protein, 10 aa, Artificial
  helical interface sequence
PNYRRRLVRW

SEQ ID NO: 5269 - protein, 13 aa, Artificial
  helical interface sequence
LKLRYLDVLIDNG

SEQ ID NO: 5270 - protein, 7 aa, Artificial
  helical interface sequence
LDDILMS

SEQ ID NO: 5271 - protein, 13 aa, Artificial
  helical interface sequence
NTESYLKNVALKH

SEQ ID NO: 5272 - protein, 30 aa, Artificial; identical to SEQ ID NO: 5118
  helical interface sequence

SEQ ID NO: 5273 - protein, 23 aa, Artificial
  helical interface sequence
AAVAVEFARLYAVELEHYEKLEG

SEQ ID NO: 5274 - protein, 16 aa, Artificial
  helical interface sequence
GLIYEETRGVLKVFLE

SEQ ID NO: 5275 - protein, 11 aa, Artificial
  helical interface sequence
AVIYHFKHYTE

SEQ ID NO: 5276 - protein, 28 aa, Artificial
  helical interface sequence
LMARKQAGFTAVMFLTVLSVLLYLTNKR

SEQ ID NO: 5277 - protein, 15 aa, Artificial
  helical interface sequence
FHVIQEQMAAAVELF

SEQ ID NO: 5278 - protein, 23 aa, Artificial
  helical interface sequence
FYLQSKVYRAAERLKWELAQREK

SEQ ID NO: 5279 - protein, 46 aa, Artificial
  helical interface sequence
SARRNAMDNASKNAGDMINRYSILYNRTRQAVITNELVDIITGASS

SEQ ID NO: 5280 - protein, 12 aa, Artificial
  helical interface sequence
VFYLHSRLLERA

SEQ ID NO: 5281 - protein, 18 aa, Artificial
  helical interface sequence
LAWKIAKMIVSDVMQQCK

SEQ ID NO: 5282 - protein, 11 aa, Artificial
  helical interface sequence
LGQLVEAAIQA

SEQ ID NO: 5283 - protein, 15 aa, Artificial
  helical interface sequence
KRELQVLYRGFKNEC

SEQ ID NO: 5284 - protein, 6 aa, Artificial
  helical interface sequence
YNVALE

SEQ ID NO: 5285 - protein, 5 aa, Artificial
  helical interface sequence
YNVAL

SEQ ID NO: 5286 - protein, 7 aa, Artificial
  helical interface sequence
WKDVKAR

SEQ ID NO: 5287 - protein, 18 aa, Artificial
  helical interface sequence
SGISPLEHAAFQGYSKVG

SEQ ID NO: 5288 - protein, 22 aa, Artificial
  helical interface sequence
AQGALANIAVDKANLEIMTKRS

SEQ ID NO: 5289 - protein, 14 aa, Artificial
  helical interface sequence
KRKVDWLTEKMREA

SEQ ID NO: 5290 - protein, 13 aa, Artificial
  helical interface sequence
EQKAVEHLVKLMA

SEQ ID NO: 5291 - protein, 12 aa, Artificial
  helical interface sequence
VFYLHSRLLERA

SEQ ID NO: 5292 - protein, 26 aa, Artificial
  helical interface sequence
MEGIHRWAIWMAVLVTLTGGIGILLS

SEQ ID NO: 5293 - protein, 5 aa, Artificial
  helical interface sequence
EKEFF

SEQ ID NO: 5294 - protein, 19 aa, Artificial
  helical interface sequence
YKDSTLIMQLLRDNLTLWT

SEQ ID NO: 5295 - protein, 22 aa, Artificial
  helical interface sequence
KTQAKAALESTLAAITESLKEG

SEQ ID NO: 5296 - protein, 5 aa, Artificial
  helical interface sequence
PEFYQ

SEQ ID NO: 5297 - protein, 14 aa, Artificial
  helical interface sequence
IQSRFNYAWGLIKS

SEQ ID NO: 5298 - protein, 12 aa, Artificial
  helical interface sequence
SQVLDDLSARFI

SEQ ID NO: 5299 - protein, 20 aa, Artificial
  helical interface sequence
KKEAEKTVREMAKIGFEMRG

SEQ ID NO: 5300 - protein, 14 aa, Artificial
  helical interface sequence
DEVVQLANRLQMEL

SEQ ID NO: 5301 - protein, 12 aa, Artificial
  helical interface sequence
PSVIKGIAQQAV

SEQ ID NO: 5302 - protein, 16 aa, Artificial
  helical interface sequence
TVSALASIGLGLLGKS

SEQ ID NO: 5303 - protein, 15 aa, Artificial
  helical interface sequence
PSWYLFQFHRLLQYA

SEQ ID NO: 5304 - protein, 11 aa, Artificial
  helical interface sequence
TVIPVDVMRRA

SEQ ID NO: 5305 - protein, 27 aa, Artificial
  helical interface sequence
STEIQVAFGRFRQAAAGLSAATALTSA

SEQ ID NO: 5306 - protein, 27 aa, Artificial
  helical interface sequence
STEIQVAFGRFRQAAAGLSAATALTSA

SEQ ID NO: 5307 - protein, 12 aa, Artificial
  helical interface sequence
PLTDAVSTADSQ

SEQ ID NO: 5308 - protein, 12 aa, Artificial
  helical interface sequence
GATLHFQQLAVG

SEQ ID NO: 5309 - protein, 22 aa, Artificial
  helical interface sequence
AGEFEEALHTAALALVKDIASD

SEQ ID NO: 5310 - protein, 75 aa, Artificial; identical to SEQ ID NO: 2772
  helical interface sequence

SEQ ID NO: 5311 - protein, 14 aa, Artificial
  helical interface sequence
KEFLLYLAGFVDGD

SEQ ID NO: 5312 - protein, 27 aa, Artificial
  helical interface sequence
NTELQAANGRFQRATASMEAARALTSN

SEQ ID NO: 5313 - protein, 27 aa, Artificial
  helical interface sequence
NTELQAANGRFQRATASMEAARALTSN

SEQ ID NO: 5314 - protein, 10 aa, Artificial
  helical interface sequence
DYEDRYYREN

SEQ ID NO: 5315 - protein, 19 aa, Artificial
  helical interface sequence
PWVLLNASWFNSFLTHALS

SEQ ID NO: 5316 - protein, 25 aa, Artificial
  helical interface sequence
AILTLGWVSLLVVFTWSIAMVVWGR

SEQ ID NO: 5317 - protein, 17 aa, Artificial
  helical interface sequence
YGDFRQIRDIMQALLVR

SEQ ID NO: 5318 - protein, 17 aa, Artificial
  helical interface sequence
YGDFRQIRDIMQALLVR

SEQ ID NO: 5319 - protein, 11 aa, Artificial
  helical interface sequence
AMDVVYALKRQ

SEQ ID NO: 5320 - protein, 6 aa, Artificial
  helical interface sequence
IDRIYA

SEQ ID NO: 5321 - protein, 20 aa, Artificial
  helical interface sequence
KQKVQMSIHQFTNICFKKCV

SEQ ID NO: 5322 - protein, 11 aa, Artificial
  helical interface sequence
GVEKIKEVISK

SEQ ID NO: 5323 - protein, 23 aa, Artificial
  helical interface sequence
KVAPPFLGAYLLYSWGTQEFERL

SEQ ID NO: 5324 - protein, 6 aa, Artificial
  helical interface sequence
VHWYVG

SEQ ID NO: 5325 - protein, 14 aa, Artificial
  helical interface sequence
ERALHITELGINEL

SEQ ID NO: 5326 - protein, 6 aa, Artificial
  helical interface sequence
VHWYVG

SEQ ID NO: 5327 - protein, 11 aa, Artificial
  helical interface sequence
KRTLRDIETFY

SEQ ID NO: 5328 - protein, 14 aa, Artificial
  helical interface sequence
HFDVARIIVDQAVK

SEQ ID NO: 5329 - protein, 15 aa, Artificial
  helical interface sequence
WVDKVKDLTKSEMNI

SEQ ID NO: 5330 - protein, 13 aa, Artificial
  helical interface sequence
PLDEIKRAFQLFD

SEQ ID NO: 5331 - protein, 16 aa, Artificial
  helical interface sequence
TAQLKSQIQQYLVESG

SEQ ID NO: 5332 - protein, 15 aa, Artificial
  helical interface sequence
LLALAQALERLSLLW

SEQ ID NO: 5333 - protein, 5 aa, Artificial
  helical interface sequence
QLKEL

SEQ ID NO: 5334 - protein, 17 aa, Artificial
  helical interface sequence
VSGTLIGLEFIRKSQLV

SEQ ID NO: 5335 - protein, 19 aa, Artificial
  helical interface sequence
PAVHASLDKFLASVSTVLT

SEQ ID NO: 5336 - protein, 7 aa, Artificial
  helical interface sequence
TDGLIAL

SEQ ID NO: 5337 - protein, 16 aa, Artificial
  helical interface sequence
VEEAGGEALGRLLVVY

SEQ ID NO: 5338 - protein, 27 aa, Artificial
  helical interface sequence
IYEETRGVLKVFLENVIRDAVTYTEHA

SEQ ID NO: 5339 - protein, 12 aa, Artificial
  helical interface sequence
AIYVYKVLKQVH

SEQ ID NO: 5340 - protein, 13 aa, Artificial
  helical interface sequence
KNATEAAWRALAS

SEQ ID NO: 5341 - protein, 22 aa, Artificial
  helical interface sequence
AQGALANIAVDKANLEIMTKRS

SEQ ID NO: 5342 - protein, 13 aa, Artificial
  helical interface sequence
AITAVINSSDVQG

SEQ ID NO: 5343 - protein, 16 aa, Artificial
  helical interface sequence
TWFDTMLGFAISAYAL

SEQ ID NO: 5344 - protein, 35 aa, Artificial
  helical interface sequence
EARKGFSYLVTATTTVGVAYAAKNVVSQFVSSMSA

SEQ ID NO: 5345 - protein, 15 aa, Artificial
  helical interface sequence
EEQIAEFKEAFSLFD

SEQ ID NO: 5346 - protein, 15 aa, Artificial
  helical interface sequence
EEQIAEFKEAFSLFD

SEQ ID NO: 5347 - protein, 12 aa, Artificial
  helical interface sequence
AFAKVVSQADAR

SEQ ID NO: 5348 - protein, 22 aa, Artificial
  helical interface sequence
AQELVMTLNELFARFDKLAAEN

SEQ ID NO: 5349 - protein, 23 aa, Artificial
  helical interface sequence
AAYLDDLRSKFLLENSVLKMEYA

SEQ ID NO: 5350 - protein, 12 aa, Artificial
  helical interface sequence
VVFTDEMAHFDR

SEQ ID NO: 5351 - protein, 7 aa, Artificial
  helical interface sequence
EPVFTDG

SEQ ID NO: 5352 - protein, 6 aa, Artificial
  helical interface sequence
LENVLS

SEQ ID NO: 5353 - protein, 12 aa, Artificial
  helical interface sequence
ESLRKYKEALLG

SEQ ID NO: 5354 - protein, 17 aa, Artificial
  helical interface sequence
TGHTMLFAVANECLKLG

SEQ ID NO: 5355 - protein, 11 aa, Artificial
  helical interface sequence
VEDFWALYNHI

SEQ ID NO: 5356 - protein, 27 aa, Artificial
  helical interface sequence
SSDLESVQGNIQRASARLEAAEKLASN

SEQ ID NO: 5357 - protein, 9 aa, Artificial
  helical interface sequence
IPAFLRKQA

SEQ ID NO: 5358 - protein, 12 aa, Artificial
  helical interface sequence
AIYVYKVLKQVH

SEQ ID NO: 5359 - protein, 20 aa, Artificial
  helical interface sequence
ISDMQHIERLLKDLVTENAY

SEQ ID NO: 5360 - protein, 13 aa, Artificial
  helical interface sequence
KSARLAVEGLWQE

SEQ ID NO: 5361 - protein, 7 aa, Artificial
  helical interface sequence
EKDIVFG

SEQ ID NO: 5362 - protein, 45 aa, Artificial
  helical interface sequence
EVNKIKSALLSTNKAVVSLSNGVSVLTSKVLDLKNYIDKQLLPIV

SEQ ID NO: 5363 - protein, 48 aa, Artificial; identical to SEQ ID NO: 2079
  helical interface sequence

SEQ ID NO: 5364 - protein, 18 aa, Artificial
  helical interface sequence
TADAFTLFELFERKLEMH

SEQ ID NO: 5365 - protein, 16 aa, Artificial
  helical interface sequence
MKTVVTQALDRMFKVY

SEQ ID NO: 5366 - protein, 12 aa, Artificial
  helical interface sequence
PLTEAVSVADSQ

SEQ ID NO: 5367 - protein, 35 aa, Artificial
  helical interface sequence
AEQSFLFSREEADTLRLKVEELEGERSRLEEEKRM

SEQ ID NO: 5368 - protein, 14 aa, Artificial
  helical interface sequence
DHEDMIGMFESWWH

SEQ ID NO: 5369 - protein, 7 aa, Artificial
  helical interface sequence
EELLRAL

SEQ ID NO: 5370 - protein, 16 aa, Artificial
  helical interface sequence
TDKDAEALFKCFRSLG

SEQ ID NO: 5371 - protein, 11 aa, Artificial
  helical interface sequence
RSEWDILLKDV

SEQ ID NO: 5372 - protein, 14 aa, Artificial
  helical interface sequence
TLIMQLLRDNLTLW

SEQ ID NO: 5373 - protein, 11 aa, Artificial
  helical interface sequence
RICLRELAHKG

SEQ ID NO: 5374 - protein, 19 aa, Artificial
  helical interface sequence
LDRAMRLVKDVFISAAERD

SEQ ID NO: 5375 - protein, 9 aa, Artificial
  helical interface sequence
YEEFVQMMT

SEQ ID NO: 5376 - protein, 13 aa, Artificial
  helical interface sequence
PEAVLAAVRRAEG

SEQ ID NO: 5377 - protein, 12 aa, Artificial
  helical interface sequence
DRHRIEEKRKRT

SEQ ID NO: 5378 - protein, 10 aa, Artificial
  helical interface sequence
KILHRLLQEG

SEQ ID NO: 5379 - protein, 26 aa, Artificial
  helical interface sequence
VIVIINLITLAAALLHTKTWFELAPK

SEQ ID NO: 5380 - protein, 7 aa, Artificial
  helical interface sequence
LRPLSYP

SEQ ID NO: 5381 - protein, 17 aa, Artificial
  helical interface sequence
ATKTFEKNLNHLIEHNE

SEQ ID NO: 5382 - protein, 14 aa, Artificial
  helical interface sequence
KLPFQRLVREIAQD

SEQ ID NO: 5383 - protein, 25 aa, Artificial
  helical interface sequence
AEDLQEALSSILGILKAVNDSMHLI

SEQ ID NO: 5384 - protein, 7 aa, Artificial
  helical interface sequence
PEFGQLA

SEQ ID NO: 5385 - protein, 11 aa, Artificial
  helical interface sequence
ALELLMAANFL

SEQ ID NO: 5386 - protein, 16 aa, Artificial
  helical interface sequence
QGCVAYFRSYFNRHFR

SEQ ID NO: 5387 - protein, 15 aa, Artificial
  helical interface sequence
KYEAEAIHIEFRQLY

SEQ ID NO: 5388 - protein, 9 aa, Artificial
  helical interface sequence
EAVEQLLEE

SEQ ID NO: 5389 - protein, 10 aa, Artificial
  helical interface sequence
ARLAVEGLWQ

SEQ ID NO: 5390 - protein, 10 aa, Artificial
  helical interface sequence
PLWKGMKRVF

SEQ ID NO: 5391 - protein, 16 aa, Artificial
  helical interface sequence
AKEYARMEAVKDERQF

SEQ ID NO: 5392 - protein, 7 aa, Artificial
  helical interface sequence
AQEVHRW

SEQ ID NO: 5393 - protein, 14 aa, Artificial
  helical interface sequence
YHAWQHRQWVIQEF

SEQ ID NO: 5394 - protein, 6 aa, Artificial
  helical interface sequence
RMENLS

SEQ ID NO: 5395 - protein, 19 aa, Artificial
  helical interface sequence
FWESDDNDNMETASQNGKK

SEQ ID NO: 5396 - protein, 15 aa, Artificial
  helical interface sequence
EDLKRRLADSVQRTF

SEQ ID NO: 5397 - protein, 13 aa, Artificial
  helical interface sequence
GDNILRLYGEARG

SEQ ID NO: 5398 - protein, 17 aa, Artificial
  helical interface sequence
VEFNNAISYVNKIKTRF

SEQ ID NO: 5399 - protein, 33 aa, Artificial
  helical interface sequence
PLAHDQQWLDHFVLYIITAVTIFVCLLLLICIV

SEQ ID NO: 5400 - protein, 14 aa, Artificial
  helical interface sequence
MQQLLKDLLTAYKF

SEQ ID NO: 5401 - protein, 6 aa, Artificial
  helical interface sequence
YPRIEA

SEQ ID NO: 5402 - protein, 13 aa, Artificial
  helical interface sequence
WNLQPLLQSAQLT

SEQ ID NO: 5403 - protein, 19 aa, Artificial
  helical interface sequence
TGVLLTVSIVYRMYEQLLR

SEQ ID NO: 5404 - protein, 17 aa, Artificial
  helical interface sequence
VEFNHAINYVNKIKNRF

SEQ ID NO: 5405 - protein, 5 aa, Artificial
  helical interface sequence
EIQRA

SEQ ID NO: 5406 - protein, 21 aa, Artificial
  helical interface sequence
EQQKEFQATARKFAREEIIPV

SEQ ID NO: 5407 - protein, 6 aa, Artificial
  helical interface sequence
LLELCK

SEQ ID NO: 5408 - protein, 14 aa, Artificial
  helical interface sequence
LVPSYAEKEAKISR

SEQ ID NO: 5409 - protein, 14 aa, Artificial
  helical interface sequence
GDFNALSNMFTQLS

SEQ ID NO: 5410 - protein, 6 aa, Artificial
  helical interface sequence
WTDGLT

SEQ ID NO: 5411 - protein, 9 aa, Artificial
  helical interface sequence
PRMNNMSFW

SEQ ID NO: 5412 - protein, 25 aa, Artificial
  helical interface sequence
PAMMWALGFIFLFTVGGLTGIVLAN

SEQ ID NO: 5413 - protein, 9 aa, Artificial
  helical interface sequence
ATTIFLFGT

SEQ ID NO: 5414 - protein, 14 aa, Artificial
  helical interface sequence
RDFQNAFKIHNAVT

SEQ ID NO: 5415 - protein, 10 aa, Artificial
  helical interface sequence
HWKNQFDHYS

SEQ ID NO: 5416 - protein, 7 aa, Artificial
  helical interface sequence
LIEKFLR

SEQ ID NO: 5417 - protein, 15 aa, Artificial
  helical interface sequence
FLALVRAWAYIRTLG

SEQ ID NO: 5418 - protein, 15 aa, Artificial
  helical interface sequence
QLTALMGAMYLAALG

SEQ ID NO: 5419 - protein, 7 aa, Artificial
  helical interface sequence
PVVQALA

SEQ ID NO: 5420 - protein, 7 aa, Artificial
  helical interface sequence
PLLGEIC

SEQ ID NO: 5421 - protein, 16 aa, Artificial
  helical interface sequence
PDAWASCLAGIAAAIS

SEQ ID NO: 5422 - protein, 9 aa, Artificial
  helical interface sequence
PGPQDFLLK

SEQ ID NO: 5423 - protein, 27 aa, Artificial
  helical interface sequence
IYEETRGVLKVFLENVIRDAVTYTEHA

SEQ ID NO: 5424 - protein, 9 aa, Artificial
  helical interface sequence
TFLMEMLEA

SEQ ID NO: 5425 - protein, 28 aa, Artificial
  helical interface sequence
MFPRMLMKLVSLRTLSSVHSEQVFALRL

SEQ ID NO: 5426 - protein, 17 aa, Artificial
  helical interface sequence
ASLTKERGRLVDMMTDS

SEQ ID NO: 5427 - protein, 20 aa, Artificial
  helical interface sequence
SVKGQSDMVKFEKARKLKDK

SEQ ID NO: 5428 - protein, 25 aa, Artificial
  helical interface sequence
YLMFIMILVAFSVILSVVVLNLHHR

SEQ ID NO: 5429 - protein, 29 aa, Artificial
  helical interface sequence
PDEFRQAFDLAVKGINIIYNLEREALKSK

SEQ ID NO: 5430 - protein, 6 aa, Artificial
  helical interface sequence
KKLTEL

SEQ ID NO: 5431 - protein, 18 aa, Artificial
  helical interface sequence
LTELHNKIVEMRERVASG

SEQ ID NO: 5432 - protein, 17 aa, Artificial
  helical interface sequence
LTELHNKIVEMRERVAS

SEQ ID NO: 5433 - protein, 13 aa, Artificial
  helical interface sequence
AEDHRVWKDYVHT

SEQ ID NO: 5434 - protein, 17 aa, Artificial
  helical interface sequence
LTELHNKIVEMRERVAS

SEQ ID NO: 5435 - protein, 26 aa, Artificial
  helical interface sequence
SSSTKKTQLQLEHLLLDLQMILNGIN

SEQ ID NO: 5436 - protein, 17 aa, Artificial
  helical interface sequence
HFAVTLEHFLESALDES

SEQ ID NO: 5437 - protein, 12 aa, Artificial
  helical interface sequence
HVDLAYLVGVCK

SEQ ID NO: 5438 - protein, 15 aa, Artificial
  helical interface sequence
MDKINNRFNYLFEVN

SEQ ID NO: 5439 - protein, 7 aa, Artificial
  helical interface sequence
ITELNPH

SEQ ID NO: 5440 - protein, 18 aa, Artificial
  helical interface sequence
AEWEAKILELAGFLDSYI

SEQ ID NO: 5441 - protein, 5 aa, Artificial
  helical interface sequence
SSLHY

SEQ ID NO: 5442 - protein, 10 aa, Artificial
  helical interface sequence
ERELLESYID

SEQ ID NO: 5443 - protein, 11 aa, Artificial
  helical interface sequence
KPAIRRLARRG

SEQ ID NO: 5444 - protein, 15 aa, Artificial
  helical interface sequence
KRELQVLYRGFKNEC

SEQ ID NO: 5445 - protein, 25 aa, Artificial
  helical interface sequence
YGAYVGNRAKMQESAETSFGFCEKR

SEQ ID NO: 5446 - protein, 12 aa, Artificial
  helical interface sequence
WIIKKGFAEMFK

SEQ ID NO: 5447 - protein, 5 aa, Artificial
  helical interface sequence
RNEMR

SEQ ID NO: 5448 - protein, 7 aa, Artificial
  helical interface sequence
TELFYKG

SEQ ID NO: 5449 - protein, 22 aa, Artificial
  helical interface sequence
PQFALTNIAVLKHNLNIVIKRS

SEQ ID NO: 5450 - protein, 11 aa, Artificial
  helical interface sequence
PYQGRELAFKL

SEQ ID NO: 5451 - protein, 9 aa, Artificial
  helical interface sequence
KILHRLLQE

SEQ ID NO: 5452 - protein, 21 aa, Artificial
  helical interface sequence
DQAQGKVHSLMEKDSYPRFLR

SEQ ID NO: 5453 - protein, 18 aa, Artificial
  helical interface sequence
NQHLCGSHLVEALYLVCG

SEQ ID NO: 5454 - protein, 9 aa, Artificial
  helical interface sequence
DRLRPLSYP

SEQ ID NO: 5455 - protein, 10 aa, Artificial
  helical interface sequence
IGDLAMVSKN

SEQ ID NO: 5456 - protein, 14 aa, Artificial
  helical interface sequence
HEEANCIAEWLHLK

SEQ ID NO: 5457 - protein, 11 aa, Artificial
  helical interface sequence
QDQVDDLLDSL

SEQ ID NO: 5458 - protein, 29 aa, Artificial
  helical interface sequence
ADEIRTLVKDMWDTRIAKLRVSADSFVRQ

SEQ ID NO: 5459 - protein, 16 aa, Artificial
  helical interface sequence
TGRLFFEFYRLLHDAR

SEQ ID NO: 5460 - protein, 22 aa, Artificial
  helical interface sequence
RIRFTLPPLVFAAYQLAFRYKE

SEQ ID NO: 5461 - protein, 20 aa, Artificial
  helical interface sequence
PSLQVQLFIEILNRYIYFYE

SEQ ID NO: 5462 - protein, 19 aa, Artificial
  helical interface sequence
PAVHASLDKFLANVSTVLT

SEQ ID NO: 5463 - protein, 16 aa, Artificial
  helical interface sequence
VEEVGGEALGRLLVVY

SEQ ID NO: 5464 - protein, 10 aa, Artificial
  helical interface sequence
RSERRKWIHC

SEQ ID NO: 5465 - protein, 12 aa, Artificial
  helical interface sequence
GAEALGRLLVVY

SEQ ID NO: 5466 - protein, 35 aa, Artificial; identical to SEQ ID NO: 1208
  helical interface sequence

SEQ ID NO: 5467 - protein, 14 aa, Artificial
  helical interface sequence
FEEQVRELRERAKE

SEQ ID NO: 5468 - protein, 7 aa, Artificial
  helical interface sequence
PPCILNN

SEQ ID NO: 5469 - protein, 16 aa, Artificial
  helical interface sequence
CPEDLLGVLELSYDEG

SEQ ID NO: 5470 - protein, 14 aa, Artificial
  helical interface sequence
RSTVAQLVKRLTDA

SEQ ID NO: 5471 - protein, 9 aa, Artificial
  helical interface sequence
RPDAEYWNS

SEQ ID NO: 5472 - protein, 16 aa, Artificial
  helical interface sequence
AQTCAFWNRFLPKLLS

SEQ ID NO: 5473 - protein, 11 aa, Artificial
  helical interface sequence
LDRAADIAVMA

SEQ ID NO: 5474 - protein, 5 aa, Artificial
  helical interface sequence
SSFIG

SEQ ID NO: 5475 - protein, 5 aa, Artificial
  helical interface sequence
SSFIG

SEQ ID NO: 5476 - protein, 31 aa, Artificial; identical to SEQ ID NO: 749
  helical interface sequence

SEQ ID NO: 5477 - protein, 22 aa, Artificial
  helical interface sequence
NISEAFEDLSKLMIKAKEMVEL

SEQ ID NO: 5478 - protein, 22 aa, Artificial
  helical interface sequence
KLLGVLAMASVPLGLILVPFIE

SEQ ID NO: 5479 - protein, 24 aa, Artificial
  helical interface sequence
LHFFLAAWRVVGVWFAALGISTMA

SEQ ID NO: 5480 - protein, 14 aa, Artificial
  helical interface sequence
YAEGLQEDQKIRDC

SEQ ID NO: 5481 - protein, 11 aa, Artificial
  helical interface sequence
LVNWVQQTLAA

SEQ ID NO: 5482 - protein, 13 aa, Artificial
  helical interface sequence
PEILERTRAELDT

SEQ ID NO: 5483 - protein, 15 aa, Artificial
  helical interface sequence
YSSWHYRSCLLPQLH

SEQ ID NO: 5484 - protein, 18 aa, Artificial
  helical interface sequence
QDESGAAAIFTVQLDDYL

SEQ ID NO: 5485 - protein, 9 aa, Artificial
  helical interface sequence
WLEAWRRDL

SEQ ID NO: 5486 - protein, 19 aa, Artificial
  helical interface sequence
TELFTLTYGSIVAQLCQDY

SEQ ID NO: 5487 - protein, 19 aa, Artificial
  helical interface sequence
TELFTLTYGSIVAQLCQDY

SEQ ID NO: 5488 - protein, 19 aa, Artificial
  helical interface sequence
TELFTLTYGSIVAQLCQDY

SEQ ID NO: 5489 - protein, 22 aa, Artificial
  helical interface sequence
PQGGLQNIAAEKHNLGILTKRS

SEQ ID NO: 5490 - protein, 10 aa, Artificial
  helical interface sequence
VEKIKEVISK

SEQ ID NO: 5491 - protein, 12 aa, Artificial
  helical interface sequence
TASVNCAKKIVS

SEQ ID NO: 5492 - protein, 18 aa, Artificial
  helical interface sequence
WPSVQQGLQQSFLHTLDS

SEQ ID NO: 5493 - protein, 24 aa, Artificial
  helical interface sequence
PLDAAVHHSEVIDTVISRALEKAK

SEQ ID NO: 5494 - protein, 6 aa, Artificial
  helical interface sequence
KILEDN

SEQ ID NO: 5495 - protein, 15 aa, Artificial
  helical interface sequence
SDVDLSKYITTIAGV

SEQ ID NO: 5496 - protein, 12 aa, Artificial
  helical interface sequence
IEPAQEEHEKYH

SEQ ID NO: 5497 - protein, 12 aa, Artificial
  helical interface sequence
RFEVELEFIQSL

SEQ ID NO: 5498 - protein, 19 aa, Artificial
  helical interface sequence
QKARLFITHLLLLLFIAAI

SEQ ID NO: 5499 - protein, 17 aa, Artificial
  helical interface sequence
ISTVREVALLRRLEAFE

SEQ ID NO: 5500 - protein, 11 aa, Artificial
  helical interface sequence
LQDLYRLINEH

SEQ ID NO: 5501 - protein, 24 aa, Artificial
  helical interface sequence
RVLRSILENLRSKIQKLESDVSAQ

SEQ ID NO: 5502 - protein, 15 aa, Artificial
  helical interface sequence
RRMGVEMTLLRALAF

SEQ ID NO: 5503 - protein, 27 aa, Artificial
  helical interface sequence
EEEKIRVDIIENQVMDFRTQLIRLCYS

SEQ ID NO: 5504 - protein, 24 aa, Artificial
  helical interface sequence
YYDAYYLKAQKVRRLITNDFLKAF

SEQ ID NO: 5505 - protein, 9 aa, Artificial
  helical interface sequence
LQRTYDYLN

SEQ ID NO: 5506 - protein, 17 aa, Artificial
  helical interface sequence
KYERARILGTRALQISM

SEQ ID NO: 5507 - protein, 10 aa, Artificial
  helical interface sequence
QLKFAMQRDL

SEQ ID NO: 5508 - protein, 19 aa, Artificial
  helical interface sequence
VNQHLCGSHLVEALYLVCG

SEQ ID NO: 5509 - protein, 12 aa, Artificial
  helical interface sequence
EDDITAVLCFVI

SEQ ID NO: 5510 - protein, 29 aa, Artificial
  helical interface sequence
SKAMSIMNSFVNDVFERIAGEASRLAHYN

SEQ ID NO: 5511 - protein, 8 aa, Artificial
  helical interface sequence
APLDRVYH

SEQ ID NO: 5512 - protein, 9 aa, Artificial
  helical interface sequence
LDALWDCLT

SEQ ID NO: 5513 - protein, 15 aa, Artificial
  helical interface sequence
ALDAVEKGVRLVEDD

SEQ ID NO: 5514 - protein, 13 aa, Artificial
  helical interface sequence
TAALEKLKSYFST

SEQ ID NO: 5515 - protein, 14 aa, Artificial
  helical interface sequence
PDLAWHIAQSLILD

SEQ ID NO: 5516 - protein, 12 aa, Artificial
  helical interface sequence
VITTTISAADAA

SEQ ID NO: 5517 - protein, 5 aa, Artificial
  helical interface sequence
YGDMY

SEQ ID NO: 5518 - protein, 6 aa, Artificial
  helical interface sequence
GEIDCK

SEQ ID NO: 5519 - protein, 16 aa, Artificial
  helical interface sequence
DTDSEEEIREAFRVFD

SEQ ID NO: 5520 - protein, 12 aa, Artificial
  helical interface sequence
VVFTDEMAHFDR

SEQ ID NO: 5521 - protein, 16 aa, Artificial
  helical interface sequence
GDTTLWWIQAMTGFAM

SEQ ID NO: 5522 - protein, 27 aa, Artificial
  helical interface sequence
NTELQVVNGRYNRATSSLEAAKALTAN

SEQ ID NO: 5523 - protein, 16 aa, Artificial
  helical interface sequence
WYIQSLCQSLRERCPR

SEQ ID NO: 5524 - protein, 16 aa, Artificial
  helical interface sequence
VDEVGGEALGRLLIVY

SEQ ID NO: 5525 - protein, 16 aa, Artificial
  helical interface sequence
VDEVGGEALGRLLVVY

SEQ ID NO: 5526 - protein, 16 aa, Artificial
  helical interface sequence
AAEYGAEALERMFLSF

SEQ ID NO: 5527 - protein, 7 aa, Artificial
  helical interface sequence
EDAAVFG

SEQ ID NO: 5528 - protein, 30 aa, Artificial; identical to SEQ ID NO: 2254
  helical interface sequence

SEQ ID NO: 5529 - protein, 16 aa, Artificial
  helical interface sequence
MKTVVTQALDRMFKVY

SEQ ID NO: 5530 - protein, 15 aa, Artificial
  helical interface sequence
SQVLCGAVKWLILEK

SEQ ID NO: 5531 - protein, 10 aa, Artificial
  helical interface sequence
EQTTVWLLTN

SEQ ID NO: 5532 - protein, 11 aa, Artificial
  helical interface sequence
VPERAQQWYAQ

SEQ ID NO: 5533 - protein, 7 aa, Artificial
  helical interface sequence
PLHALLH

SEQ ID NO: 5534 - protein, 16 aa, Artificial
  helical interface sequence
VAECGAEALARLLIVY

SEQ ID NO: 5535 - protein, 7 aa, Artificial
  helical interface sequence
LIEKFLR

SEQ ID NO: 5536 - protein, 8 aa, Artificial
  helical interface sequence
HADYLLRT

SEQ ID NO: 5537 - protein, 29 aa, Artificial
  helical interface sequence
SGAPVYLTAVLEYLAAEILELAGNAARDN

SEQ ID NO: 5538 - protein, 6 aa, Artificial
  helical interface sequence
WTDGLT

SEQ ID NO: 5539 - protein, 14 aa, Artificial
  helical interface sequence
AKNYGRAVYECLRG

SEQ ID NO: 5540 - protein, 20 aa, Artificial
  helical interface sequence
WRDRFLFVAEAIYKAQAETG

SEQ ID NO: 5541 - protein, 17 aa, Artificial
  helical interface sequence
TVNAAFVRESAEVYQQR

SEQ ID NO: 5542 - protein, 15 aa, Artificial
  helical interface sequence
INSAARNIQHLLYGK

SEQ ID NO: 5543 - protein, 22 aa, Artificial
  helical interface sequence
AADCQFWETWLGSQCRLHELRE

SEQ ID NO: 5544 - protein, 28 aa, Artificial
  helical interface sequence
GCKLQDTLVRQERPIRKSIEDLRNTVDS

SEQ ID NO: 5545 - protein, 27 aa, Artificial
  helical interface sequence
GCKLQDTLVRQERPIRKSIEDLRNTVD

SEQ ID NO: 5546 - protein, 25 aa, Artificial
  helical interface sequence
VFWGLFGAGGMWSAIIAPVMILLVG

SEQ ID NO: 5547 - protein, 18 aa, Artificial
  helical interface sequence
ESLLGHLMIVGKKCAADL

SEQ ID NO: 5548 - protein, 5 aa, Artificial
  helical interface sequence
FDDLI

SEQ ID NO: 5549 - protein, 30 aa, Artificial; identical to SEQ ID NO: 2587
  helical interface sequence

SEQ ID NO: 5550 - protein, 9 aa, Artificial
  helical interface sequence
EKTLRKWLK

SEQ ID NO: 5551 - protein, 34 aa, Artificial; identical to SEQ ID NO: 365
  helical interface sequence

SEQ ID NO: 5552 - protein, 7 aa, Artificial
  helical interface sequence
ALLRYLL

SEQ ID NO: 5553 - protein, 18 aa, Artificial
  helical interface sequence
QDESGAAAIFTVQLDDYL

SEQ ID NO: 5554 - protein, 17 aa, Artificial
  helical interface sequence
ASIEEERGQLIDLMIDA

SEQ ID NO: 5555 - protein, 9 aa, Artificial
  helical interface sequence
EAVEQLLEE

SEQ ID NO: 5556 - protein, 20 aa, Artificial
  helical interface sequence
VNYFLDGERQLGTRLMELRN

SEQ ID NO: 5557 - protein, 14 aa, Artificial
  helical interface sequence
YHAWQHRQWVIQEF

SEQ ID NO: 5558 - protein, 6 aa, Artificial
  helical interface sequence
RIIQKI

SEQ ID NO: 5559 - protein, 10 aa, Artificial
  helical interface sequence
EMERDCMIAH

SEQ ID NO: 5560 - protein, 8 aa, Artificial
  helical interface sequence
ERELLESY

SEQ ID NO: 5561 - protein, 10 aa, Artificial
  helical interface sequence
SAIPEGQFMD

SEQ ID NO: 5562 - protein, 14 aa, Artificial
  helical interface sequence
SEQAAKIIQIINEF

SEQ ID NO: 5563 - protein, 14 aa, Artificial
  helical interface sequence
EEWVAKQTKRMLDM

SEQ ID NO: 5564 - protein, 20 aa, Artificial
  helical interface sequence
VGTVRSRIFRAREAIDNKVQ

SEQ ID NO: 5565 - protein, 5 aa, Artificial
  helical interface sequence
IESFF

SEQ ID NO: 5566 - protein, 22 aa, Artificial
  helical interface sequence
VGDAQVLVRYMKAELELYRLQR

SEQ ID NO: 5567 - protein, 5 aa, Artificial
  helical interface sequence
ERKYR

SEQ ID NO: 5568 - protein, 31 aa, Artificial; identical to SEQ ID NO: 5061
  helical interface sequence

SEQ ID NO: 5569 - protein, 16 aa, Artificial
  helical interface sequence
AGAHGAEALERMFLGF

SEQ ID NO: 5570 - protein, 14 aa, Artificial
  helical interface sequence
AKNYGRAVYECLRG

SEQ ID NO: 5571 - protein, 20 aa, Artificial
  helical interface sequence
WRDRFLFCAEALYKAQAETG

SEQ ID NO: 5572 - protein, 29 aa, Artificial
  helical interface sequence
LFAKLLQKMTDLRQIVTEHVQLLQVIKKT

SEQ ID NO: 5573 - protein, 5 aa, Artificial
  helical interface sequence
VESFL

SEQ ID NO: 5574 - protein, 22 aa, Artificial
  helical interface sequence
VKYRRRVLLAISRKVVDQLWEA

SEQ ID NO: 5575 - protein, 14 aa, Artificial
  helical interface sequence
LEKKVKELKEKIEK

SEQ ID NO: 5576 - protein, 11 aa, Artificial
  helical interface sequence
QTFAYGVLDSN

SEQ ID NO: 5577 - protein, 9 aa, Artificial
  helical interface sequence
FDILDDWLK

SEQ ID NO: 5578 - protein, 47 aa, Artificial; identical to SEQ ID NO: 4319
  helical interface sequence

SEQ ID NO: 5579 - protein, 11 aa, Artificial
  helical interface sequence
SFKITRGIEAV

SEQ ID NO: 5580 - protein, 12 aa, Artificial
  helical interface sequence
LTARLYSLLFRR

SEQ ID NO: 5581 - protein, 31 aa, Artificial; identical to SEQ ID NO: 1463
  helical interface sequence

SEQ ID NO: 5582 - protein, 7 aa, Artificial
  helical interface sequence
LRYIYSQ

SEQ ID NO: 5583 - protein, 11 aa, Artificial
  helical interface sequence
PQDIIKNARSF

SEQ ID NO: 5584 - protein, 30 aa, Artificial
  helical interface sequence
DEVALQGIEFWSNVCDEEMDLAIEASEAAE

SEQ ID NO: 5585 - protein, 9 aa, Artificial
  helical interface sequence
IYPYVIQEL

SEQ ID NO: 5586 - protein, 10 aa, Artificial
  helical interface sequence
WAQIFILDCL

SEQ ID NO: 5587 - protein, 25 aa, Artificial
  helical interface sequence
LYAKLMGLLADLRSINNAYSYELQR

SEQ ID NO: 5588 - protein, 23 aa, Artificial
  helical interface sequence
LYAKLLGLLAELRSINEAYGYQI

SEQ ID NO: 5589 - protein, 13 aa, Artificial
  helical interface sequence
KDLKNTMQYLTNF

SEQ ID NO: 5590 - protein, 14 aa, Artificial
  helical interface sequence
GIGCELLKNLVLTG

SEQ ID NO: 5591 - protein, 25 aa, Artificial
  helical interface sequence
TAPVAAVQAAVSNLVRVGKETVQTT

SEQ ID NO: 5592 - protein, 6 aa, Artificial
  helical interface sequence
PHQWQK

SEQ ID NO: 5593 - protein, 6 aa, Artificial
  helical interface sequence
KSSFKF

SEQ ID NO: 5594 - protein, 11 aa, Artificial
  helical interface sequence
TVALREIRRYQ

SEQ ID NO: 5595 - protein, 16 aa, Artificial
  helical interface sequence
QKEIDRLNEVAKNLNE

SEQ ID NO: 5596 - protein, 8 aa, Artificial
  helical interface sequence
IMGLMSLA

SEQ ID NO: 5597 - protein, 13 aa, Artificial
  helical interface sequence
KEDALKLVQLKQT

SEQ ID NO: 5598 - protein, 23 aa, Artificial
  helical interface sequence
PAEVEALREKVYASLEAYCKHKY

SEQ ID NO: 5599 - protein, 14 aa, Artificial
  helical interface sequence
QDYKDMLAKKRDGF

SEQ ID NO: 5600 - protein, 29 aa, Artificial
  helical interface sequence
PEYWDRNTQIFKTNTQTYRESLRNLRGYY

SEQ ID NO: 5601 - protein, 29 aa, Artificial
  helical interface sequence
PEYWDRNTQIFKTNTQTYRESLRNLRGYY

SEQ ID NO: 5602 - protein, 19 aa, Artificial
  helical interface sequence
PEDILVDIKRDYVLSKLRD

SEQ ID NO: 5603 - protein, 9 aa, Artificial
  helical interface sequence
ASRFASEIS

SEQ ID NO: 5604 - protein, 25 aa, Artificial
  helical interface sequence
NRRMAACLRDMEIVLRYVSYAEIAG

SEQ ID NO: 5605 - protein, 25 aa, Artificial
  helical interface sequence
HRNQAACIRDLGFILRYVTYSVLAG

SEQ ID NO: 5606 - protein, 8 aa, Artificial
  helical interface sequence
PRQVLAEF

SEQ ID NO: 5607 - protein, 21 aa, Artificial
  helical interface sequence
ETEEMANTLESILDFAKQNDS

SEQ ID NO: 5608 - protein, 10 aa, Artificial
  helical interface sequence
AAELRHVMTN

SEQ ID NO: 5609 - protein, 41 aa, Artificial; identical to SEQ ID NO: 529
  helical interface sequence

SEQ ID NO: 5610 - protein, 12 aa, Artificial
  helical interface sequence
WFNNYKRSLATY

SEQ ID NO: 5611 - protein, 14 aa, Artificial
  helical interface sequence
RIRYVLSSYLRCRL

SEQ ID NO: 5612 - protein, 29 aa, Artificial
  helical interface sequence
DGLNQLYNLVAQDYALTDTIEALSRMLHR

SEQ ID NO: 5613 - protein, 14 aa, Artificial
  helical interface sequence
AKEEMARFWEKNTK

SEQ ID NO: 5614 - protein, 22 aa, Artificial
  helical interface sequence
DLTKQLRLEENKKDRIKAAEFY

SEQ ID NO: 5615 - protein, 13 aa, Artificial
  helical interface sequence
NVIRDAVTYTEHA

SEQ ID NO: 5616 - protein, 17 aa, Artificial
  helical interface sequence
ELHRQRSELARANYEKA

SEQ ID NO: 5617 - protein, 18 aa, Artificial
  helical interface sequence
HDREAFSQAIWRATFAQV

SEQ ID NO: 5618 - protein, 13 aa, Artificial
  helical interface sequence
PLDEIKRAFQLFD

SEQ ID NO: 5619 - protein, 10 aa, Artificial
  helical interface sequence
RDWAESTLMT

SEQ ID NO: 5620 - protein, 15 aa, Artificial
  helical interface sequence
TREGNDLYREMKETG

SEQ ID NO: 5621 - protein, 11 aa, Artificial
  helical interface sequence
KNVRAQLVDMK

SEQ ID NO: 5622 - protein, 16 aa, Artificial
  helical interface sequence
AEEAVRLARLGRLLTG

SEQ ID NO: 5623 - protein, 11 aa, Artificial
  helical interface sequence
FKEQIYDVYRY

SEQ ID NO: 5624 - protein, 15 aa, Artificial
  helical interface sequence
KRELQVLYRGFKNEC

SEQ ID NO: 5625 - protein, 5 aa, Artificial
  helical interface sequence
FDDLI

SEQ ID NO: 5626 - protein, 12 aa, Artificial
  helical interface sequence
FKNLKRVAKELG

SEQ ID NO: 5627 - protein, 7 aa, Artificial
  helical interface sequence
DSQWAAF

SEQ ID NO: 5628 - protein, 14 aa, Artificial
  helical interface sequence
PLLRQAIELFDHQG

SEQ ID NO: 5629 - protein, 17 aa, Artificial
  helical interface sequence
SALALSNAITNLAASIF

SEQ ID NO: 5630 - protein, 13 aa, Artificial
  helical interface sequence
TVALREIRRYQKS

SEQ ID NO: 5631 - protein, 7 aa, Artificial
  helical interface sequence
LRLMLAG

SEQ ID NO: 5632 - protein, 18 aa, Artificial
  helical interface sequence
NQHLCGSHLVEALYLVCG

SEQ ID NO: 5633 - protein, 19 aa, Artificial
  helical interface sequence
VNQHLCGSHLVEALYLVCG

SEQ ID NO: 5634 - protein, 9 aa, Artificial
  helical interface sequence
TLFKWMIFN

SEQ ID NO: 5635 - protein, 9 aa, Artificial
  helical interface sequence
VNLAIQVLN

SEQ ID NO: 5636 - protein, 6 aa, Artificial
  helical interface sequence
EKELLD

SEQ ID NO: 5637 - protein, 8 aa, Artificial
  helical interface sequence
LDEMRHFY

SEQ ID NO: 5638 - protein, 19 aa, Artificial
  helical interface sequence
PEVHASLDKFLCAVGTVLT

SEQ ID NO: 5639 - protein, 13 aa, Artificial
  helical interface sequence
PLNAFDGALLNAG

SEQ ID NO: 5640 - protein, 14 aa, Artificial
  helical interface sequence
PAKVQSLVDTIRED

SEQ ID NO: 5641 - protein, 7 aa, Artificial
  helical interface sequence
PPCILNN

SEQ ID NO: 5642 - protein, 5 aa, Artificial
  helical interface sequence
DGRLA

SEQ ID NO: 5643 - protein, 11 aa, Artificial
  helical interface sequence
HSREMKVIERY

SEQ ID NO: 5644 - protein, 19 aa, Artificial
  helical interface sequence
SPLQSFMETQMDAFQEKVK

SEQ ID NO: 5645 - protein, 11 aa, Artificial
  helical interface sequence
PGDLAEELRRN

SEQ ID NO: 5646 - protein, 13 aa, Artificial
  helical interface sequence
FQVEYALEAVKRG

SEQ ID NO: 5647 - protein, 15 aa, Artificial
  helical interface sequence
RQEVKQMVVATLAES

SEQ ID NO: 5648 - protein, 6 aa, Artificial
  helical interface sequence
RDASTL

SEQ ID NO: 5649 - protein, 10 aa, Artificial
  helical interface sequence
EELFNVQDQH

SEQ ID NO: 5650 - protein, 27 aa, Artificial
  helical interface sequence
SEELVAEAHNLCTLLENAIQDTVREQG

SEQ ID NO: 5651 - protein, 7 aa, Artificial
  helical interface sequence
GRALLRI

SEQ ID NO: 5652 - protein, 7 aa, Artificial
  helical interface sequence
QRLYKAL

SEQ ID NO: 5653 - protein, 29 aa, Artificial
  helical interface sequence
SKAMSIMNSFVNDVFERIAGEASRLAHYN

SEQ ID NO: 5654 - protein, 29 aa, Artificial
  helical interface sequence
GLIYEETRGVLKVFLENVIRDAVTYTEHA

SEQ ID NO: 5655 - protein, 12 aa, Artificial
  helical interface sequence
ASGIVKAVMDEL

SEQ ID NO: 5656 - protein, 8 aa, Artificial
  helical interface sequence
ETFDAWYC

SEQ ID NO: 5657 - protein, 20 aa, Artificial
  helical interface sequence
EQKMFAAMVADNQMAMVMLN

SEQ ID NO: 5658 - protein, 6 aa, Artificial
  helical interface sequence
IDRIYA

SEQ ID NO: 5659 - protein, 5 aa, Artificial
  helical interface sequence
DEDWL

SEQ ID NO: 5660 - protein, 10 aa, Artificial
  helical interface sequence
QKFQSIVIGC

SEQ ID NO: 5661 - protein, 32 aa, Artificial; identical to SEQ ID NO: 2343
  helical interface sequence

SEQ ID NO: 5662 - protein, 23 aa, Artificial
  helical interface sequence
PLSQTLFWLLVANLLILTWIGSQ

SEQ ID NO: 5663 - protein, 13 aa, Artificial
  helical interface sequence
NPILWRARQYINS

SEQ ID NO: 5664 - protein, 5 aa, Artificial
  helical interface sequence
WRGGR

SEQ ID NO: 5665 - protein, 10 aa, Artificial
  helical interface sequence
VEQMHEDIIS

SEQ ID NO: 5666 - protein, 13 aa, Artificial
  helical interface sequence
FPEFLTMMARKMK

SEQ ID NO: 5667 - protein, 26 aa, Artificial
  helical interface sequence
EQCERARRLQAKMMTNLVMAKDRLQL

SEQ ID NO: 5668 - protein, 23 aa, Artificial
  helical interface sequence
IEFRRTLTLSFFFKFYLTVLKKL

SEQ ID NO: 5669 - protein, 12 aa, Artificial
  helical interface sequence
IEPAQEEHEKYH

SEQ ID NO: 5670 - protein, 7 aa, Artificial
  helical interface sequence
QDIIAIL

SEQ ID NO: 5671 - protein, 7 aa, Artificial
  helical interface sequence
RPLVEAG

SEQ ID NO: 5672 - protein, 17 aa, Artificial
  helical interface sequence
DSTRETVLKQIREFLEE

SEQ ID NO: 5673 - protein, 16 aa, Artificial
  helical interface sequence
WVDKVKDLTKSEMNIN

SEQ ID NO: 5674 - protein, 24 aa, Artificial
  helical interface sequence
PITRFNTQTKMIEQVSQEIFERNF

SEQ ID NO: 5675 - protein, 44 aa, Artificial
  helical interface sequence
MIDAATLKSRKMLEEIMKYEASILTHDSSIRYLQEIYNSNNQKI

SEQ ID NO: 5676 - protein, 6 aa, Artificial
  helical interface sequence
VFHRKK

SEQ ID NO: 5677 - protein, 19 aa, Artificial
  helical interface sequence
QTQLRQAVQLLTRTELTLK

SEQ ID NO: 5678 - protein, 9 aa, Artificial
  helical interface sequence
GEIARREFR

SEQ ID NO: 5679 - protein, 13 aa, Artificial
  helical interface sequence
YAAKLLFQELMAM

SEQ ID NO: 5680 - protein, 17 aa, Artificial
  helical interface sequence
KYERARILGTRALQISM

SEQ ID NO: 5681 - protein, 16 aa, Artificial
  helical interface sequence
FTQNLGKFAVDEENKI

SEQ ID NO: 5682 - protein, 19 aa, Artificial
  helical interface sequence
PAVHASLDKFLASVSTVLT

SEQ ID NO: 5683 - protein, 9 aa, Artificial
  helical interface sequence
PRKVLSEMG

SEQ ID NO: 5684 - protein, 6 aa, Artificial
  helical interface sequence
DFVARN

SEQ ID NO: 5685 - protein, 14 aa, Artificial
  helical interface sequence
PQARAFLEEVFRRK

SEQ ID NO: 5686 - protein, 12 aa, Artificial
  helical interface sequence
SREIQTAVRLLL

SEQ ID NO: 5687 - protein, 29 aa, Artificial
  helical interface sequence
SKAMSIMNSFVNDVFERIAGEASRLAHYN

SEQ ID NO: 5688 - protein, 16 aa, Artificial
  helical interface sequence
NFGLHANVEAWKVLSK

SEQ ID NO: 5689 - protein, 33 aa, Artificial
  helical interface sequence
EIAAIEYEQAAIKEEIAAIKDKIAAIKEYIAAI

SEQ ID NO: 5690 - protein, 35 aa, Artificial; identical to SEQ ID NO: 768
  helical interface sequence

SEQ ID NO: 5691 - protein, 20 aa, Artificial
  helical interface sequence
ENLYDDRVFRIKRALDLSMR

SEQ ID NO: 5692 - protein, 15 aa, Artificial
  helical interface sequence
LKTAVQMAVFIHNHK

SEQ ID NO: 5693 - protein, 14 aa, Artificial
  helical interface sequence
KGELQSAIKSLHSR

SEQ ID NO: 5694 - protein, 13 aa, Artificial
  helical interface sequence
AYQSFEQVVNELF

SEQ ID NO: 5695 - protein, 7 aa, Artificial
  helical interface sequence
SQLRDLD

SEQ ID NO: 5696 - protein, 10 aa, Artificial
  helical interface sequence
ISFDKEIRNN

SEQ ID NO: 5697 - protein, 12 aa, Artificial
  helical interface sequence
QSAWFYHRWLLG

SEQ ID NO: 5698 - protein, 5 aa, Artificial
  helical interface sequence
PAEYC

SEQ ID NO: 5699 - protein, 9 aa, Artificial
  helical interface sequence
IRKWLVLRN

SEQ ID NO: 5700 - protein, 11 aa, Artificial
  helical interface sequence
YEDFVKKVMAG

SEQ ID NO: 5701 - protein, 7 aa, Artificial
  helical interface sequence
SQLRDLD

SEQ ID NO: 5702 - protein, 14 aa, Artificial
  helical interface sequence
EEQWEREVEKVLNR

SEQ ID NO: 5703 - protein, 12 aa, Artificial
  helical interface sequence
VSQGMAVFNQLK

SEQ ID NO: 5704 - protein, 12 aa, Artificial
  helical interface sequence
LFQMEMARRSTQ

SEQ ID NO: 5705 - protein, 12 aa, Artificial
  helical interface sequence
PYIRARMYMWRY

SEQ ID NO: 5706 - protein, 12 aa, Artificial
  helical interface sequence
PYIRARMYMWRY

SEQ ID NO: 5707 - protein, 6 aa, Artificial
  helical interface sequence
VDELVG

SEQ ID NO: 5708 - protein, 11 aa, Artificial
  helical interface sequence
TVALREIRRYQ

SEQ ID NO: 5709 - protein, 29 aa, Artificial
  helical interface sequence
SKAMSIMNSFVNDVFERIAGEASRLAHYN

SEQ ID NO: 5710 - protein, 19 aa, Artificial
  helical interface sequence
ELAKHAVSEGTKAVTKYTS

SEQ ID NO: 5711 - protein, 16 aa, Artificial
  helical interface sequence
WYIQSLCQSLRERCPR

SEQ ID NO: 5712 - protein, 5 aa, Artificial
  helical interface sequence
TEQLA

SEQ ID NO: 5713 - protein, 39 aa, Artificial
  helical interface sequence
ITKAMEMVAASKMRKSQDRMAASRPYAETMRKVIGHLAH

SEQ ID NO: 5714 - protein, 18 aa, Artificial
  helical interface sequence
VEILVRRLSDIKQGYTQH

SEQ ID NO: 5715 - protein, 7 aa, Artificial
  helical interface sequence
VGCGQYS

SEQ ID NO: 5716 - protein, 5 aa, Artificial
  helical interface sequence
RYIQN

SEQ ID NO: 5717 - protein, 12 aa, Artificial
  helical interface sequence
PLTEAVSVADSQ

SEQ ID NO: 5718 - protein, 17 aa, Artificial
  helical interface sequence
DALTLERGRLVDMMLDS

SEQ ID NO: 5719 - protein, 6 aa, Artificial
  helical interface sequence
LVEMEN

SEQ ID NO: 5720 - protein, 12 aa, Artificial
  helical interface sequence
RADAENAMRYIN

SEQ ID NO: 5721 - protein, 5 aa, Artificial
  helical interface sequence
DRLRP

SEQ ID NO: 5722 - protein, 12 aa, Artificial
  helical interface sequence
ESLRKYKEALLG

SEQ ID NO: 5723 - protein, 14 aa, Artificial
  helical interface sequence
LKERCLQVVRSLVK

SEQ ID NO: 5724 - protein, 29 aa, Artificial
  helical interface sequence
GLIYEEVRAVLKSFLESVIRDSVTYTEHA

SEQ ID NO: 5725 - protein, 6 aa, Artificial
  helical interface sequence
WTDGLT

SEQ ID NO: 5726 - protein, 9 aa, Artificial
  helical interface sequence
PRQLLKEEF

SEQ ID NO: 5727 - protein, 15 aa, Artificial
  helical interface sequence
EEQIAEFKEAFSLFD

SEQ ID NO: 5728 - protein, 8 aa, Artificial
  helical interface sequence
PMQYKAMQ

SEQ ID NO: 5729 - protein, 5 aa, Artificial
  helical interface sequence
ERKYR

SEQ ID NO: 5730 - protein, 6 aa, Artificial
  helical interface sequence
WECFER

SEQ ID NO: 5731 - protein, 8 aa, Artificial
  helical interface sequence
IPELVNQG

SEQ ID NO: 5732 - protein, 11 aa, Artificial
  helical interface sequence
PFICELAKAYV

SEQ ID NO: 5733 - protein, 17 aa, Artificial
  helical interface sequence
KNDLQNMSADLAKNGFK

SEQ ID NO: 5734 - protein, 29 aa, Artificial
  helical interface sequence
GYILRYLHANGASFFFMVMFMHMAKGLYY

SEQ ID NO: 5735 - protein, 7 aa, Artificial
  helical interface sequence
PEFGQLA

SEQ ID NO: 5736 - protein, 13 aa, Artificial
  helical interface sequence
NGELFQVLKMMVG

SEQ ID NO: 5737 - protein, 7 aa, Artificial
  helical interface sequence
GMLWDSA

SEQ ID NO: 5738 - protein, 7 aa, Artificial
  helical interface sequence
AQEVHRW

SEQ ID NO: 5739 - protein, 13 aa, Artificial
  helical interface sequence
EQEALEKLAAYVQ

SEQ ID NO: 5740 - protein, 10 aa, Artificial
  helical interface sequence
PLWKGMKRVF

SEQ ID NO: 5741 - protein, 8 aa, Artificial
  helical interface sequence
NICYVITH

SEQ ID NO: 5742 - protein, 13 aa, Artificial
  helical interface sequence
EKELNRIKRWCIM

SEQ ID NO: 5743 - protein, 8 aa, Artificial
  helical interface sequence
ERELLESY

SEQ ID NO: 5744 - protein, 40 aa, Artificial; identical to SEQ ID NO: 3168
  helical interface sequence

SEQ ID NO: 5745 - protein, 13 aa, Artificial
  helical interface sequence
PHFMPCLTRFLDG

SEQ ID NO: 5746 - protein, 9 aa, Artificial
  helical interface sequence
EAVEQLLEE

SEQ ID NO: 5747 - protein, 10 aa, Artificial
  helical interface sequence
ARTWRFLTFG

SEQ ID NO: 5748 - protein, 29 aa, Artificial
  helical interface sequence
RKHMLQALFITITLGVYFTLLQASEYYEA

SEQ ID NO: 5749 - protein, 30 aa, Artificial; identical to SEQ ID NO: 4094
  helical interface sequence

SEQ ID NO: 5750 - protein, 11 aa, Artificial
  helical interface sequence
VPERAQQWYAQ

SEQ ID NO: 5751 - protein, 24 aa, Artificial
  helical interface sequence
VGTVRSRIFRAREAIDNKVQPLIR

SEQ ID NO: 5752 - protein, 16 aa, Artificial
  helical interface sequence
QARAVQMSTKVLIQFL

SEQ ID NO: 5753 - protein, 27 aa, Artificial
  helical interface sequence
NTELQAVNGRYQRAAASLEAARSLTSN

SEQ ID NO: 5754 - protein, 12 aa, Artificial
  helical interface sequence
QEVVDKVMETLD

SEQ ID NO: 5755 - protein, 22 aa, Artificial
  helical interface sequence
YNEFENLRRAGIVHADMRGYSY

SEQ ID NO: 5756 - protein, 22 aa, Artificial
  helical interface sequence
YNEFENLRRAGIVHADMRGYSY

SEQ ID NO: 5757 - protein, 23 aa, Artificial
  helical interface sequence
AGIAIELVRLFAVELEHYEKIEG

SEQ ID NO: 5758 - protein, 12 aa, Artificial
  helical interface sequence
PSVTLFRQYLRI

SEQ ID NO: 5759 - protein, 12 aa, Artificial
  helical interface sequence
ESDAAKKLQEFI

SEQ ID NO: 5760 - protein, 48 aa, Artificial
  helical interface sequence
VPARDYLIDGSRGILSGTSDLLLTFDEAEVRKIIRVCKGILEYLTVAE

SEQ ID NO: 5761 - protein, 16 aa, Artificial
  helical interface sequence
PRGWFTFAHAVFALLF

SEQ ID NO: 5762 - protein, 24 aa, Artificial
  helical interface sequence
KDILERKRAAVDRVCRHNYQLELR

SEQ ID NO: 5763 - protein, 17 aa, Artificial
  helical interface sequence
ERTLEKLELERRYWQQK

SEQ ID NO: 5764 - protein, 5 aa, Artificial
  helical interface sequence
AHKAI

SEQ ID NO: 5765 - protein, 10 aa, Artificial
  helical interface sequence
ESAWNYLKGI

SEQ ID NO: 5766 - protein, 8 aa, Artificial
  helical interface sequence
EVECQVAC

SEQ ID NO: 5767 - protein, 7 aa, Artificial
  helical interface sequence
RFAYAVL

SEQ ID NO: 5768 - protein, 13 aa, Artificial
  helical interface sequence
FSPYQDVVRTVGN

SEQ ID NO: 5769 - protein, 12 aa, Artificial
  helical interface sequence
PSRVVEALNKVS

SEQ ID NO: 5770 - protein, 12 aa, Artificial
  helical interface sequence
AQMMRGRLRKIT

SEQ ID NO: 5771 - protein, 16 aa, Artificial
  helical interface sequence
EAAIVGAALGMAAHGL

SEQ ID NO: 5772 - protein, 14 aa, Artificial
  helical interface sequence
DEQIAAQVDYIVAN

SEQ ID NO: 5773 - protein, 28 aa, Artificial
  helical interface sequence
EWKTVVGAAMFFIGFTALLLIWEKHYVY

SEQ ID NO: 5774 - protein, 15 aa, Artificial
  helical interface sequence
PEIALELLMAANFLD

SEQ ID NO: 5775 - protein, 15 aa, Artificial
  helical interface sequence
KKQVLRMEHLVLKVL

SEQ ID NO: 5776 - protein, 9 aa, Artificial
  helical interface sequence
HWKNQFDHY

SEQ ID NO: 5777 - protein, 17 aa, Artificial
  helical interface sequence
KYERARILGTRALQISM

SEQ ID NO: 5778 - protein, 12 aa, Artificial
  helical interface sequence
GNEIIRSACKWS

SEQ ID NO: 5779 - protein, 13 aa, Artificial
  helical interface sequence
SEEEIREAFRVFD

SEQ ID NO: 5780 - protein, 11 aa, Artificial
  helical interface sequence
MEDQISLLKGA

SEQ ID NO: 5781 - protein, 5 aa, Artificial
  helical interface sequence
ELLIT

SEQ ID NO: 5782 - protein, 13 aa, Artificial
  helical interface sequence
FHRRELWEAIEAG

SEQ ID NO: 5783 - protein, 10 aa, Artificial
  helical interface sequence
IFIPRLLMVD

SEQ ID NO: 5784 - protein, 10 aa, Artificial
  helical interface sequence
FPHYVAVVKS

SEQ ID NO: 5785 - protein, 21 aa, Artificial
  helical interface sequence
EELLLQQIDNIKAYIFDAKQC

SEQ ID NO: 5786 - protein, 22 aa, Artificial
  helical interface sequence
LDEVEVLTENLRELKHTLAKQK

SEQ ID NO: 5787 - protein, 13 aa, Artificial
  helical interface sequence
FQVEYALEAVKRG

SEQ ID NO: 5788 - protein, 29 aa, Artificial
  helical interface sequence
SKAMSIMNSFVNDVFERIAGEASRLAHYN

SEQ ID NO: 5789 - protein, 17 aa, Artificial
  helical interface sequence
NLERDVQRILELMEHVQ

SEQ ID NO: 5790 - protein, 49 aa, Artificial; identical to SEQ ID NO: 2477
  helical interface sequence

SEQ ID NO: 5791 - protein, 25 aa, Artificial
  helical interface sequence
MFPRMLMKLVSLRTLSSVHSEQVFA

SEQ ID NO: 5792 - protein, 19 aa, Artificial
  helical interface sequence
DENSIELARVVDRGIRESE

SEQ ID NO: 5793 - protein, 9 aa, Artificial
  helical interface sequence
WAQWFETQH

SEQ ID NO: 5794 - protein, 19 aa, Artificial
  helical interface sequence
KEFLGTYNKLTETCFLDCV

SEQ ID NO: 5795 - protein, 12 aa, Artificial
  helical interface sequence
PQLIMLANVALT

SEQ ID NO: 5796 - protein, 12 aa, Artificial
  helical interface sequence
LSKLMKAYCERQ

SEQ ID NO: 5797 - protein, 8 aa, Artificial
  helical interface sequence
PRQVLAEF

SEQ ID NO: 5798 - protein, 12 aa, Artificial
  helical interface sequence
RRQKRLIFSTIT

SEQ ID NO: 5799 - protein, 10 aa, Artificial
  helical interface sequence
PNYRRRLVRW

SEQ ID NO: 5800 - protein, 8 aa, Artificial
  helical interface sequence
PRQVLAEF

SEQ ID NO: 5801 - protein, 8 aa, Artificial
  helical interface sequence
PRQVLAEF

SEQ ID NO: 5802 - protein, 22 aa, Artificial
  helical interface sequence
AEEMEWFNNYKRSLATYMRSLG

SEQ ID NO: 5803 - protein, 10 aa, Artificial
  helical interface sequence
AAEVEFLAEK

SEQ ID NO: 5804 - protein, 11 aa, Artificial
  helical interface sequence
PAARKLARELG

SEQ ID NO: 5805 - protein, 27 aa, Artificial
  helical interface sequence
AAAVQEAAVSAILGLIILLGINLGLVA

SEQ ID NO: 5806 - protein, 27 aa, Artificial
  helical interface sequence
AAAVQEAAVSAILGLIILLGINLGLVA

SEQ ID NO: 5807 - protein, 17 aa, Artificial
  helical interface sequence
FPALIKQASLDALFKCG

SEQ ID NO: 5808 - protein, 17 aa, Artificial
  helical interface sequence
ELHRQRSELARANYEKA

SEQ ID NO: 5809 - protein, 11 aa, Artificial
  helical interface sequence
EREVYDLFGIV

SEQ ID NO: 5810 - protein, 13 aa, Artificial
  helical interface sequence
PSFVNLQSLPYAC

SEQ ID NO: 5811 - protein, 6 aa, Artificial
  helical interface sequence
PSFVNL

SEQ ID NO: 5812 - protein, 11 aa, Artificial
  helical interface sequence
EEEIREAFRVF

SEQ ID NO: 5813 - protein, 28 aa, Artificial
  helical interface sequence
GFWQAITVCALGAFISWMLREVEISRKL

SEQ ID NO: 5814 - protein, 25 aa, Artificial
  helical interface sequence
HIAWNFAAAIFFVLCIGCIHPTLVG

SEQ ID NO: 5815 - protein, 12 aa, Artificial
  helical interface sequence
AIYIYTVLKQVH

SEQ ID NO: 5816 - protein, 13 aa, Artificial
  helical interface sequence
TVALREIRRYQKS

SEQ ID NO: 5817 - protein, 7 aa, Artificial
  helical interface sequence
LGPIYYR

SEQ ID NO: 5818 - protein, 8 aa, Artificial
  helical interface sequence
FDCFRMWF

SEQ ID NO: 5819 - protein, 17 aa, Artificial
  helical interface sequence
KTLAAMKNFAEQYAKRT

SEQ ID NO: 5820 - protein, 37 aa, Artificial; identical to SEQ ID NO: 4641
  helical interface sequence

SEQ ID NO: 5821 - protein, 7 aa, Artificial
  helical interface sequence
LWLAINL

SEQ ID NO: 5822 - protein, 12 aa, Artificial
  helical interface sequence
EKAMELIRELHR

SEQ ID NO: 5823 - protein, 8 aa, Artificial
  helical interface sequence
KEDFRYRS

SEQ ID NO: 5824 - protein, 29 aa, Artificial
  helical interface sequence
GFMLRYLHANGASLFFIAVYLHIFRGLYY

SEQ ID NO: 5825 - protein, 29 aa, Artificial
  helical interface sequence
GFMLRYLHANGASLFFIAVYLHIFRGLYY

SEQ ID NO: 5826 - protein, 10 aa, Artificial
  helical interface sequence
IQARRLWKDY

SEQ ID NO: 5827 - protein, 11 aa, Artificial
  helical interface sequence
TVIPVDVMRRA

SEQ ID NO: 5828 - protein, 9 aa, Artificial
  helical interface sequence
TEIIAFSDR

SEQ ID NO: 5829 - protein, 12 aa, Artificial
  helical interface sequence
AFTKVAAQADTR

SEQ ID NO: 5830 - protein, 12 aa, Artificial
  helical interface sequence
GATLHFQQLAVG

SEQ ID NO: 5831 - protein, 12 aa, Artificial
  helical interface sequence
ASGPVKAIMDEV

SEQ ID NO: 5832 - protein, 11 aa, Artificial
  helical interface sequence
DEEVDEMIREA

SEQ ID NO: 5833 - protein, 14 aa, Artificial
  helical interface sequence
YFLQISRVNDLNRM

SEQ ID NO: 5834 - protein, 9 aa, Artificial
  helical interface sequence
EQTKSDIRN

SEQ ID NO: 5835 - protein, 10 aa, Artificial
  helical interface sequence
DYEDRYYREN

SEQ ID NO: 5836 - protein, 12 aa, Artificial
  helical interface sequence
RFNLKSIEEQLG

SEQ ID NO: 5837 - protein, 5 aa, Artificial
  helical interface sequence
KYELD

SEQ ID NO: 5838 - protein, 22 aa, Artificial
  helical interface sequence
TADAEILINTARIHAQNYLKTY

SEQ ID NO: 5839 - protein, 19 aa, Artificial
  helical interface sequence
VEEVIKLVRDSFTSATERH

SEQ ID NO: 5840 - protein, 22 aa, Artificial
  helical interface sequence
AGDTVQFAEYIQANIQLYSIRE

SEQ ID NO: 5841 - protein, 16 aa, Artificial
  helical interface sequence
VAECGAEALARLLIVY

SEQ ID NO: 5842 - protein, 16 aa, Artificial
  helical interface sequence
ESTLQQAIVNTQVVDG

SEQ ID NO: 5843 - protein, 11 aa, Artificial
  helical interface sequence
TASVNCAKKIV

SEQ ID NO: 5844 - protein, 30 aa, Artificial
  helical interface sequence
ERLISMAYGQIGMIQALGGFFSYFVILAEN

SEQ ID NO: 5845 - protein, 23 aa, Artificial
  helical interface sequence
WFGVIMIPTLLAATICFVIAFIA

SEQ ID NO: 5846 - protein, 10 aa, Artificial
  helical interface sequence
EKTQRMLSGF

SEQ ID NO: 5847 - protein, 8 aa, Artificial
  helical interface sequence
QHIQLLQK

SEQ ID NO: 5848 - protein, 16 aa, Artificial
  helical interface sequence
ISGTFNFMIVFQAEHN

SEQ ID NO: 5849 - protein, 10 aa, Artificial
  helical interface sequence
WFDILDDWLK

SEQ ID NO: 5850 - protein, 13 aa, Artificial
  helical interface sequence
AKALQIIKLAELY

SEQ ID NO: 5851 - protein, 22 aa, Artificial
  helical interface sequence
LWETVQKWREYRRQCQRSLTED

SEQ ID NO: 5852 - protein, 7 aa, Artificial
  helical interface sequence
PEFGQLA

SEQ ID NO: 5853 - protein, 9 aa, Artificial
  helical interface sequence
AYTEELKKR

SEQ ID NO: 5854 - protein, 9 aa, Artificial
  helical interface sequence
KPAIRRLAR

SEQ ID NO: 5855 - protein, 5 aa, Artificial
  helical interface sequence
DEDWL

SEQ ID NO: 5856 - protein, 20 aa, Artificial
  helical interface sequence
KEELRKLLQKLRESSLMLLD

SEQ ID NO: 5857 - protein, 19 aa, Artificial
  helical interface sequence
QMSKQLDMFKTNLEEFASK

SEQ ID NO: 5858 - protein, 23 aa, Artificial
  helical interface sequence
PLSQTLFWLLVANLLILTWIGSQ

SEQ ID NO: 5859 - protein, 9 aa, Artificial
  helical interface sequence
MRDNWRSEL

SEQ ID NO: 5860 - protein, 13 aa, Artificial
  helical interface sequence
GDFYEGINFAGAF

SEQ ID NO: 5861 - protein, 5 aa, Artificial
  helical interface sequence
IRYRT

SEQ ID NO: 5862 - protein, 12 aa, Artificial
  helical interface sequence
LYPIAVLIDELR

SEQ ID NO: 5863 - protein, 9 aa, Artificial
  helical interface sequence
PMVRRAAAS

SEQ ID NO: 5864 - protein, 9 aa, Artificial
  helical interface sequence
QEGSQFVKG

SEQ ID NO: 5865 - protein, 28 aa, Artificial
  helical interface sequence
SMEAERVRVFHKQAFEYISIALRIDEDE

SEQ ID NO: 5866 - protein, 17 aa, Artificial
  helical interface sequence
FCTPGIVMSMYTLLRNQ

SEQ ID NO: 5867 - protein, 9 aa, Artificial
  helical interface sequence
RELYIHRIG

SEQ ID NO: 5868 - protein, 13 aa, Artificial
  helical interface sequence
GQIFEAYNMAALW

SEQ ID NO: 5869 - protein, 14 aa, Artificial
  helical interface sequence
EMGFAGIAVGAAMA

SEQ ID NO: 5870 - protein, 16 aa, Artificial
  helical interface sequence
AQVPLGAGIALACKYN

SEQ ID NO: 5871 - protein, 16 aa, Artificial
  helical interface sequence
AQVPLGAGIALACKYN

SEQ ID NO: 5872 - protein, 5 aa, Artificial
  helical interface sequence
TYYMS

SEQ ID NO: 5873 - protein, 33 aa, Artificial; identical to SEQ ID NO: 2186
  helical interface sequence

SEQ ID NO: 5874 - protein, 12 aa, Artificial
  helical interface sequence
SFISILIFKGLF

SEQ ID NO: 5875 - protein, 12 aa, Artificial
  helical interface sequence
VFYLHSRLLERA

SEQ ID NO: 5876 - protein, 14 aa, Artificial
  helical interface sequence
RSTVAQLVQTLEQH

SEQ ID NO: 5877 - protein, 14 aa, Artificial
  helical interface sequence
NERTLDFHDSNVKN

SEQ ID NO: 5878 - protein, 10 aa, Artificial
  helical interface sequence
YEELKHLLSR

SEQ ID NO: 5879 - protein, 16 aa, Artificial
  helical interface sequence
AEEYGAETLERMFITY

SEQ ID NO: 5880 - protein, 16 aa, Artificial
  helical interface sequence
FTQILSTVEPKALEMV

SEQ ID NO: 5881 - protein, 18 aa, Artificial
  helical interface sequence
DEQKETILKALNDAIEKG

SEQ ID NO: 5882 - protein, 15 aa, Artificial
  helical interface sequence
EEQIAEFKEAFSLFD

SEQ ID NO: 5883 - protein, 12 aa, Artificial
  helical interface sequence
LDLLFMSLRNAC

SEQ ID NO: 5884 - protein, 17 aa, Artificial
  helical interface sequence
PYITNRTFMLAKEASLA

SEQ ID NO: 5885 - protein, 29 aa, Artificial
  helical interface sequence
GCRMKGLIDEVNQDFTNRINKLKNSLFEY

SEQ ID NO: 5886 - protein, 6 aa, Artificial
  helical interface sequence
PIEMYL

SEQ ID NO: 5887 - protein, 11 aa, Artificial
  helical interface sequence
GVTRLEVGFSA

SEQ ID NO: 5888 - protein, 12 aa, Artificial
  helical interface sequence
ACHLRKATCLLG

SEQ ID NO: 5889 - protein, 13 aa, Artificial
  helical interface sequence
LAMANSLRRVMIA

SEQ ID NO: 5890 - protein, 12 aa, Artificial
  helical interface sequence
VSAHTSHLVGSA

SEQ ID NO: 5891 - protein, 6 aa, Artificial
  helical interface sequence
GSDIAG

SEQ ID NO: 5892 - protein, 12 aa, Artificial
  helical interface sequence
IVTKSIVNADAE

SEQ ID NO: 5893 - protein, 10 aa, Artificial
  helical interface sequence
YNLNQFAMSL

SEQ ID NO: 5894 - protein, 14 aa, Artificial
  helical interface sequence
PDLAWHIAQSLILD

SEQ ID NO: 5895 - protein, 13 aa, Artificial
  helical interface sequence
DIFEKLIEKQLSF

SEQ ID NO: 5896 - protein, 11 aa, Artificial
  helical interface sequence
YEELVRMVLSG

SEQ ID NO: 5897 - protein, 10 aa, Artificial
  helical interface sequence
FPEFLTMMAR

SEQ ID NO: 5898 - protein, 5 aa, Artificial
  helical interface sequence
FDKWY

SEQ ID NO: 5899 - protein, 11 aa, Artificial
  helical interface sequence
YEDFVKKVMAG

SEQ ID NO: 5900 - protein, 18 aa, Artificial
  helical interface sequence
QDEIDDLKDVFELFDFWD

SEQ ID NO: 5901 - protein, 5 aa, Artificial
  helical interface sequence
ECENG

SEQ ID NO: 5902 - protein, 7 aa, Artificial
  helical interface sequence
PAAMETH

SEQ ID NO: 5903 - protein, 11 aa, Artificial
  helical interface sequence
YAERLRAYLEG

SEQ ID NO: 5904 - protein, 15 aa, Artificial
  helical interface sequence
KDQWEERIQVWHEEH

SEQ ID NO: 5905 - protein, 7 aa, Artificial
  helical interface sequence
SDFQCKD

SEQ ID NO: 5906 - protein, 17 aa, Artificial
  helical interface sequence
PVNFKLLSHCLLVTLAA

SEQ ID NO: 5907 - protein, 17 aa, Artificial
  helical interface sequence
PVNFKLLSHCLLVTLAA

SEQ ID NO: 5908 - protein, 16 aa, Artificial
  helical interface sequence
VDEVGGEALGRLLIVY

SEQ ID NO: 5909 - protein, 24 aa, Artificial
  helical interface sequence
IEFRRTLTLSFFFKFYLTVLKKLG

SEQ ID NO: 5910 - protein, 23 aa, Artificial
  helical interface sequence
PAEVEALREKVYASLEAYCKHKY

SEQ ID NO: 5911 - protein, 30 aa, Artificial
  helical interface sequence
LFAKLLQKMTDLRQIVTEHVQLLQVIKKTE

SEQ ID NO: 5912 - protein, 8 aa, Artificial
  helical interface sequence
IKQYNYLH

SEQ ID NO: 5913 - protein, 8 aa, Artificial
  helical interface sequence
KRWYRLAS

SEQ ID NO: 5914 - protein, 22 aa, Artificial
  helical interface sequence
NADSRILIEKARVEAQSHRLTL

SEQ ID NO: 5915 - protein, 48 aa, Artificial; identical to SEQ ID NO: 1430
  helical interface sequence

SEQ ID NO: 5916 - protein, 12 aa, Artificial
  helical interface sequence
PLTEAVSVADSQ

SEQ ID NO: 5917 - protein, 17 aa, Artificial
  helical interface sequence
DALTLERGRLVDMMLDS

SEQ ID NO: 5918 - protein, 8 aa, Artificial
  helical interface sequence
KELRDRAN

SEQ ID NO: 5919 - protein, 6 aa, Artificial
  helical interface sequence
WTDGLT

SEQ ID NO: 5920 - protein, 13 aa, Artificial
  helical interface sequence
HQIEYAMEAVKQG

SEQ ID NO: 5921 - protein, 22 aa, Artificial
  helical interface sequence
ATDVTTLNEMFRYKTNLYKLKE

SEQ ID NO: 5922 - protein, 23 aa, Artificial
  helical interface sequence
IPDARNAALRAKAEAAEFRYKYG

SEQ ID NO: 5923 - protein, 10 aa, Artificial
  helical interface sequence
LVDEFKELVY

SEQ ID NO: 5924 - protein, 15 aa, Artificial
  helical interface sequence
LLALAQALERLSLLW

SEQ ID NO: 5925 - protein, 27 aa, Artificial
  helical interface sequence
TCGIADFLNNYQTSVDKDLRTLEGILY

SEQ ID NO: 5926 - protein, 29 aa, Artificial
  helical interface sequence
GLWQIITICATGAFVSWALREVEICRKLG

SEQ ID NO: 5927 - protein, 27 aa, Artificial
  helical interface sequence
IYEETRGVLKVFLENVIRDAVTYTEHA

SEQ ID NO: 5928 - protein, 8 aa, Artificial
  helical interface sequence
QYANNLAG

SEQ ID NO: 5929 - protein, 28 aa, Artificial
  helical interface sequence
GLWLIASFFMFVAVWSWWGRTYLRAQAL

SEQ ID NO: 5930 - protein, 29 aa, Artificial
  helical interface sequence
PAHMIAISFFFTNALALALHGALVLSAAN

SEQ ID NO: 5931 - protein, 10 aa, Artificial
  helical interface sequence
PDHEDTFFRD

SEQ ID NO: 5932 - protein, 7 aa, Artificial
  helical interface sequence
PEFGQLA

SEQ ID NO: 5933 - protein, 8 aa, Artificial
  helical interface sequence
VGCGQYSR

SEQ ID NO: 5934 - protein, 12 aa, Artificial
  helical interface sequence
DAWSSRILLEEM

SEQ ID NO: 5935 - protein, 10 aa, Artificial
  helical interface sequence
TYGKFIAREE

SEQ ID NO: 5936 - protein, 16 aa, Artificial
  helical interface sequence
DLIYSILTQIASDVYG

SEQ ID NO: 5937 - protein, 10 aa, Artificial
  helical interface sequence
ASQVGDIARA

SEQ ID NO: 5938 - protein, 14 aa, Artificial
  helical interface sequence
YHAWQHRQWVIQEF

SEQ ID NO: 5939 - protein, 14 aa, Artificial
  helical interface sequence
YHAWQHRQWVIQEF

SEQ ID NO: 5940 - protein, 13 aa, Artificial
  helical interface sequence
KEYWRYIGRSLQS

SEQ ID NO: 5941 - protein, 13 aa, Artificial
  helical interface sequence
KEYWRYIGRSLQS

SEQ ID NO: 5942 - protein, 16 aa, Artificial
  helical interface sequence
AQVPLGAGIALACKYN

SEQ ID NO: 5943 - protein, 14 aa, Artificial
  helical interface sequence
LAMANSLRRVMIAE

SEQ ID NO: 5944 - protein, 23 aa, Artificial
  helical interface sequence
AHHNALERKRRDHIKDSFHSLRD

SEQ ID NO: 5945 - protein, 29 aa, Artificial
  helical interface sequence
GWIIRYMHANGASMFFICLYMHVGRGLYY

SEQ ID NO: 5946 - protein, 9 aa, Artificial
  helical interface sequence
AIDALSSDF

SEQ ID NO: 5947 - protein, 14 aa, Artificial
  helical interface sequence
EEWVAKQTKRMLDM

SEQ ID NO: 5948 - protein, 12 aa, Artificial
  helical interface sequence
EEELQEMIAEAD

SEQ ID NO: 5949 - protein, 11 aa, Artificial
  helical interface sequence
QKAFNLLVVRY

SEQ ID NO: 5950 - protein, 8 aa, Artificial
  helical interface sequence
IVEQCCAS

SEQ ID NO: 5951 - protein, 16 aa, Artificial
  helical interface sequence
HIAWNFAAAIFFVLCI

SEQ ID NO: 5952 - protein, 25 aa, Artificial
  helical interface sequence
NDLLYMFPVVILGTFACVIGLSVLD

SEQ ID NO: 5953 - protein, 8 aa, Artificial
  helical interface sequence
LYSKVKPL

SEQ ID NO: 5954 - protein, 23 aa, Artificial
  helical interface sequence
PSLVEEIQRYYLNTLRVYILNQN

SEQ ID NO: 5955 - protein, 15 aa, Artificial
  helical interface sequence
TEFEYLRKVLFEYMM

SEQ ID NO: 5956 - protein, 21 aa, Artificial
  helical interface sequence
NVEEEVIKRELTEKVKEAVSK

SEQ ID NO: 5957 - protein, 19 aa, Artificial
  helical interface sequence
VEEKDLEKKVKELKEKIEK

SEQ ID NO: 5958 - protein, 17 aa, Artificial
  helical interface sequence
VKKIEKFHSQLMRLMVA

SEQ ID NO: 5959 - protein, 12 aa, Artificial
  helical interface sequence
FQVEYALEAVKR

SEQ ID NO: 5960 - protein, 16 aa, Artificial
  helical interface sequence
PRGWFTFAHAVFALLF

SEQ ID NO: 5961 - protein, 22 aa, Artificial
  helical interface sequence
PLAVEGQTQGGVWMGMGQALSE

SEQ ID NO: 5962 - protein, 42 aa, Artificial; identical to SEQ ID NO: 2035
  helical interface sequence

SEQ ID NO: 5963 - protein, 15 aa, Artificial
  helical interface sequence
AFGKNLLPRVAAKLE

SEQ ID NO: 5964 - protein, 6 aa, Artificial
  helical interface sequence
DDFDAQ

SEQ ID NO: 5965 - protein, 14 aa, Artificial
  helical interface sequence
WHLLRQEALLKEEL

SEQ ID NO: 5966 - protein, 22 aa, Artificial
  helical interface sequence
KIMKVIRKNIVKKLIEAFNEIA

SEQ ID NO: 5967 - protein, 5 aa, Artificial
  helical interface sequence
LEWLN

SEQ ID NO: 5968 - protein, 24 aa, Artificial
  helical interface sequence
ARTWRFLTFGLALPSVALCTLNSW

SEQ ID NO: 5969 - protein, 15 aa, Artificial
  helical interface sequence
LQVLDRLKMKLQEKG

SEQ ID NO: 5970 - protein, 9 aa, Artificial
  helical interface sequence
AYSYIRDAW

SEQ ID NO: 5971 - protein, 19 aa, Artificial
  helical interface sequence
PDEVVSLVNQGLQEGERDF

SEQ ID NO: 5972 - protein, 19 aa, Artificial
  helical interface sequence
PDEVVSLVNQGLQEGERDF

SEQ ID NO: 5973 - protein, 15 aa, Artificial
  helical interface sequence
FLALVRAWAYIRTLG

SEQ ID NO: 5974 - protein, 19 aa, Artificial
  helical interface sequence
GGEKALTALAFVFAIQKFK

SEQ ID NO: 5975 - protein, 7 aa, Artificial
  helical interface sequence
PLLGEIC

SEQ ID NO: 5976 - protein, 32 aa, Artificial
  helical interface sequence
NTCDEKTQSLGVKFLDEYQSKVKRQIFSGYQS

SEQ ID NO: 5977 - protein, 22 aa, Artificial
  helical interface sequence
MYERKVENIRTILVNIHHLLNE

SEQ ID NO: 5978 - protein, 30 aa, Artificial
  helical interface sequence
PALIYSAKFALVFPLSYHTWNGIRHLVWDM

SEQ ID NO: 5979 - protein, 11 aa, Artificial
  helical interface sequence
VDDQMKLLQNC

SEQ ID NO: 5980 - protein, 6 aa, Artificial
  helical interface sequence
PAFLPY

SEQ ID NO: 5981 - protein, 13 aa, Artificial
  helical interface sequence
FQVEYALEAVKRG

SEQ ID NO: 5982 - protein, 22 aa, Artificial
  helical interface sequence
IPDGRHLVNRGREEAASFKKLY

SEQ ID NO: 5983 - protein, 10 aa, Artificial
  helical interface sequence
QVEYALESIS

SEQ ID NO: 5984 - protein, 13 aa, Artificial
  helical interface sequence
PQQQQQVLNILKS

SEQ ID NO: 5985 - protein, 13 aa, Artificial
  helical interface sequence
PQQQQQVLNILKS

SEQ ID NO: 5986 - protein, 29 aa, Artificial
  helical interface sequence
PEYWDRNTQIFKTNTQTYRESLRNLRGYY

SEQ ID NO: 5987 - protein, 29 aa, Artificial
  helical interface sequence
PEYWDRNTQIFKTNTQTYRESLRNLRGYY

SEQ ID NO: 5988 - protein, 15 aa, Artificial
  helical interface sequence
QGTLFELILAANYLD

SEQ ID NO: 5989 - protein, 14 aa, Artificial
  helical interface sequence
RAISKAVDTVEIVR

SEQ ID NO: 5990 - protein, 12 aa, Artificial
  helical interface sequence
FPEFLSMMGRRM

SEQ ID NO: 5991 - protein, 26 aa, Artificial
  helical interface sequence
LQDIDQAENTARSTAVKLLEELKKHL

SEQ ID NO: 5992 - protein, 11 aa, Artificial
  helical interface sequence
KEAYELAKEWF

SEQ ID NO: 5993 - protein, 8 aa, Artificial
  helical interface sequence
YEKLLEKA

SEQ ID NO: 5994 - protein, 8 aa, Artificial
  helical interface sequence
PRQVLAEF

SEQ ID NO: 5995 - protein, 10 aa, Artificial
  helical interface sequence
PNYRRRLVRW

SEQ ID NO: 5996 - protein, 14 aa, Artificial
  helical interface sequence
AEDHRVWKDYVHTL

SEQ ID NO: 5997 - protein, 13 aa, Artificial
  helical interface sequence
IDGFLLTPVQKIC

SEQ ID NO: 5998 - protein, 10 aa, Artificial
  helical interface sequence
DEEVDEMIRE

SEQ ID NO: 5999 - protein, 14 aa, Artificial
  helical interface sequence
PALVKLVEKALYDG

SEQ ID NO: 6000 - protein, 8 aa, Artificial
  helical interface sequence
PRQVLAEF

SEQ ID NO: 6001 - protein, 6 aa, Artificial
  helical interface sequence
HLDVVR

SEQ ID NO: 6002 - protein, 14 aa, Artificial
  helical interface sequence
RIRYVLSSYLRCRL

SEQ ID NO: 6003 - protein, 17 aa, Artificial
  helical interface sequence
RGEQLLAYVKQVLAATG

SEQ ID NO: 6004 - protein, 15 aa, Artificial
  helical interface sequence
TGHSLLHTLYGRSLR

SEQ ID NO: 6005 - protein, 23 aa, Artificial
  helical interface sequence
AAVAVEFARLYAVELEHYEKLEG

SEQ ID NO: 6006 - protein, 13 aa, Artificial
  helical interface sequence
NVIRDAVTYTEHA

SEQ ID NO: 6007 - protein, 8 aa, Artificial
  helical interface sequence
YEELKHLL

SEQ ID NO: 6008 - protein, 32 aa, Artificial
  helical interface sequence
AEQSEELHKYVIDGTRVFLGLALVAHFLAFSA

SEQ ID NO: 6009 - protein, 5 aa, Artificial
  helical interface sequence
YICGE

SEQ ID NO: 6010 - protein, 16 aa, Artificial
  helical interface sequence
AADVLDWLEEWLQTEW

SEQ ID NO: 6011 - protein, 16 aa, Artificial
  helical interface sequence
EKDTKEEILKAFKLFD

SEQ ID NO: 6012 - protein, 16 aa, Artificial
  helical interface sequence
EKDTKEEILKAFKLFD

SEQ ID NO: 6013 - protein, 25 aa, Artificial
  helical interface sequence
DIKALTTLCDLADRELVVIIGWAKH

SEQ ID NO: 6014 - protein, 10 aa, Artificial
  helical interface sequence
EAIIRKALMG

SEQ ID NO: 6015 - protein, 5 aa, Artificial
  helical interface sequence
LYELQ

SEQ ID NO: 6016 - protein, 21 aa, Artificial
  helical interface sequence
FQEFMAFVAMVTTACHEFFEH

SEQ ID NO: 6017 - protein, 12 aa, Artificial
  helical interface sequence
VFYLHSRLLERA

SEQ ID NO: 6018 - protein, 15 aa, Artificial
  helical interface sequence
TREGNDLYREMKETG

SEQ ID NO: 6019 - protein, 11 aa, Artificial
  helical interface sequence
PKDIQLARRIR

SEQ ID NO: 6020 - protein, 17 aa, Artificial
  helical interface sequence
LAWKIAKMIVSDVMQQC

SEQ ID NO: 6021 - protein, 27 aa, Artificial
  helical interface sequence
VGTIFAGAFVFQTVFDTAITSWYENHN

SEQ ID NO: 6022 - protein, 9 aa, Artificial
  helical interface sequence
RELYIHRIG

SEQ ID NO: 6023 - protein, 9 aa, Artificial
  helical interface sequence
RELYIHRIG

SEQ ID NO: 6024 - protein, 22 aa, Artificial
  helical interface sequence
EEDTGVTNRDLISRRIKEYNNL

SEQ ID NO: 6025 - protein, 5 aa, Artificial
  helical interface sequence
ERKYR

SEQ ID NO: 6026 - protein, 13 aa, Artificial
  helical interface sequence
TVALREIRRYQKS

SEQ ID NO: 6027 - protein, 20 aa, Artificial
  helical interface sequence
TFDGTAIANAVVKELAETIK

SEQ ID NO: 6028 - protein, 29 aa, Artificial
  helical interface sequence
FGDFLTVMTQKMSEKDTKEEILKAFKLFD

SEQ ID NO: 6029 - protein, 10 aa, Artificial
  helical interface sequence
DRQINQLAQR

SEQ ID NO: 6030 - protein, 12 aa, Artificial
  helical interface sequence
QDVAEEVRAVLE

SEQ ID NO: 6031 - protein, 19 aa, Artificial
  helical interface sequence
PWILMSDDLSDLIHTNIYL

SEQ ID NO: 6032 - protein, 8 aa, Artificial
  helical interface sequence
PSIVHRKC

SEQ ID NO: 6033 - protein, 14 aa, Artificial
  helical interface sequence
GDVLYELLQHILKQ

SEQ ID NO: 6034 - protein, 23 aa, Artificial
  helical interface sequence
VERLCFQIEQAHWFYEDFIRAQN

SEQ ID NO: 6035 - protein, 38 aa, Artificial; identical to SEQ ID NO: 3680
  helical interface sequence

SEQ ID NO: 6036 - protein, 50 aa, Artificial
  helical interface sequence
HEYNTQFQEKSREYDRLYEEYTRTSQEIQMKRTAIEAFNETIKIFEEQCQ

SEQ ID NO: 6037 - protein, 18 aa, Artificial
  helical interface sequence
LSSSISQLKRIQRDFKGL

SEQ ID NO: 6038 - protein, 35 aa, Artificial; identical to SEQ ID NO: 1208
  helical interface sequence

SEQ ID NO: 6039 - protein, 14 aa, Artificial
  helical interface sequence
FEEQVRELRERAKE

SEQ ID NO: 6040 - protein, 12 aa, Artificial
  helical interface sequence
VFYLHSRLLERA

SEQ ID NO: 6041 - protein, 10 aa, Artificial
  helical interface sequence
VEDFWALYNH

SEQ ID NO: 6042 - protein, 14 aa, Artificial
  helical interface sequence
EWGQIFILDCLSNY

SEQ ID NO: 6043 - protein, 16 aa, Artificial
  helical interface sequence
MEEYAREVFPIEEEAN

SEQ ID NO: 6044 - protein, 15 aa, Artificial
  helical interface sequence
EEQIAEFKEAFSLFD

SEQ ID NO: 6045 - protein, 19 aa, Artificial
  helical interface sequence
ASIHDTVENLIILANNSLS

SEQ ID NO: 6046 - protein, 7 aa, Artificial
  helical interface sequence
GEVFIRA

SEQ ID NO: 6047 - protein, 22 aa, Artificial
  helical interface sequence
TADAEILINTARIHAQNYLKTY

SEQ ID NO: 6048 - protein, 18 aa, Artificial
  helical interface sequence
PEDLFETISQALLNAADR

SEQ ID NO: 6049 - protein, 7 aa, Artificial
  helical interface sequence
KQVKSVA

SEQ ID NO: 6050 - protein, 17 aa, Artificial
  helical interface sequence
SQLIFNAQALKDRYEGN

SEQ ID NO: 6051 - protein, 13 aa, Artificial
  helical interface sequence
ITALREIKILQLL

SEQ ID NO: 6052 - protein, 25 aa, Artificial
  helical interface sequence
GTGVLLTVSIVYRMYEQLLREKVSE

SEQ ID NO: 6053 - protein, 16 aa, Artificial
  helical interface sequence
GARGLLKQLEISYKDK

SEQ ID NO: 6054 - protein, 5 aa, Artificial
  helical interface sequence
YEYFT

SEQ ID NO: 6055 - protein, 23 aa, Artificial
  helical interface sequence
AGDFETKLSDYGHNIGIRLLELL

SEQ ID NO: 6056 - protein, 30 aa, Artificial; identical to SEQ ID NO: 1386
  helical interface sequence

SEQ ID NO: 6057 - protein, 20 aa, Artificial
  helical interface sequence
EDESYARAYRIIRAHQTELT

SEQ ID NO: 6058 - protein, 16 aa, Artificial
  helical interface sequence
EDYKQIMGLLLALMKA

SEQ ID NO: 6059 - protein, 8 aa, Artificial
  helical interface sequence
QVQEFKEA

SEQ ID NO: 6060 - protein, 17 aa, Artificial
  helical interface sequence
AQYIQAAGVALGLKMRG

SEQ ID NO: 6061 - protein, 12 aa, Artificial
  helical interface sequence
AYGSLFNSIQGL

SEQ ID NO: 6062 - protein, 13 aa, Artificial
  helical interface sequence
LEGRILAALTLKN

SEQ ID NO: 6063 - protein, 17 aa, Artificial
  helical interface sequence
FCTPGIVMSMYTLLRNQ

SEQ ID NO: 6064 - protein, 15 aa, Artificial
  helical interface sequence
ELDMMVGKILCYLYL

SEQ ID NO: 6065 - protein, 16 aa, Artificial
  helical interface sequence
AQVPLGAGIALACKYN

SEQ ID NO: 6066 - protein, 10 aa, Artificial
  helical interface sequence
APILRQMIDS

SEQ ID NO: 6067 - protein, 16 aa, Artificial
  helical interface sequence
NLVADLVQEVQQARDL

SEQ ID NO: 6068 - protein, 16 aa, Artificial
  helical interface sequence
NLVADLVQEVQQARDL

SEQ ID NO: 6069 - protein, 15 aa, Artificial
  helical interface sequence
DTCKKYRSAYITPCT

SEQ ID NO: 6070 - protein, 76 aa, Artificial; identical to SEQ ID NO: 362
  helical interface sequence

SEQ ID NO: 6071 - protein, 14 aa, Artificial
  helical interface sequence
IRESIAEADADIAS

SEQ ID NO: 6072 - protein, 36 aa, Artificial; identical to SEQ ID NO: 4828
  helical interface sequence

SEQ ID NO: 6073 - protein, 9 aa, Artificial
  helical interface sequence
YCCRRMILT

SEQ ID NO: 6074 - protein, 8 aa, Artificial
  helical interface sequence
PIEMYLSD

SEQ ID NO: 6075 - protein, 14 aa, Artificial
  helical interface sequence
EEIVAHLPPLCEEK

SEQ ID NO: 6076 - protein, 7 aa, Artificial
  helical interface sequence
IRRASML

SEQ ID NO: 6077 - protein, 6 aa, Artificial
  helical interface sequence
KAVYVL

SEQ ID NO: 6078 - protein, 29 aa, Artificial
  helical interface sequence
VQAEEQKLISEEDLLRKRREQLKHKLEQL

SEQ ID NO: 6079 - protein, 10 aa, Artificial
  helical interface sequence
FEYRARVVRE

SEQ ID NO: 6080 - protein, 22 aa, Artificial
  helical interface sequence
AQGALANIAVDKANLEIMTKRS

SEQ ID NO: 6081 - protein, 13 aa, Artificial
  helical interface sequence
PGELDRIKSFVSS

SEQ ID NO: 6082 - protein, 13 aa, Artificial
  helical interface sequence
TAALEKLKSYFST

SEQ ID NO: 6083 - protein, 11 aa, Artificial
  helical interface sequence
TAIVTQINHAI

SEQ ID NO: 6084 - protein, 33 aa, Artificial; identical to SEQ ID NO: 5689
  helical interface sequence

SEQ ID NO: 6085 - protein, 8 aa, Artificial
  helical interface sequence
WFSKLASS

SEQ ID NO: 6086 - protein, 13 aa, Artificial
  helical interface sequence
YSRLRKMLYLIYV

SEQ ID NO: 6087 - protein, 15 aa, Artificial
  helical interface sequence
WEDNVGEWIEEMKEE

SEQ ID NO: 6088 - protein, 17 aa, Artificial
  helical interface sequence
ERYNSQLLSFVRDLNQY

SEQ ID NO: 6089 - protein, 12 aa, Artificial
  helical interface sequence
PYFRSYFAAINF

SEQ ID NO: 6090 - protein, 16 aa, Artificial
  helical interface sequence
AATLEEKLNKIFEKLG

SEQ ID NO: 6091 - protein, 25 aa, Artificial
  helical interface sequence
EPLQLHVDKAVSGLRSLTTLLRALG

SEQ ID NO: 6092 - protein, 25 aa, Artificial
  helical interface sequence
QEKINKCYRDIDHYMRLVNYSLVIG

SEQ ID NO: 6093 - protein, 19 aa, Artificial
  helical interface sequence
PEVQASWQKMVTGVASALS

SEQ ID NO: 6094 - protein, 18 aa, Artificial
  helical interface sequence
CDVLAKRMANLSQIYTQR

SEQ ID NO: 6095 - protein, 16 aa, Artificial
  helical interface sequence
QQNMKDGLQNCKATYK

SEQ ID NO: 6096 - protein, 13 aa, Artificial
  helical interface sequence
DEYQELFRNKRQL

SEQ ID NO: 6097 - protein, 30 aa, Artificial
  helical interface sequence
AAAVQEAAVSAILGLIILLGINLGLVAATL

SEQ ID NO: 6098 - protein, 12 aa, Artificial
  helical interface sequence
KKKLQDLVREVD

SEQ ID NO: 6099 - protein, 5 aa, Artificial
  helical interface sequence
LQQWG

SEQ ID NO: 6100 - protein, 9 aa, Artificial
  helical interface sequence
FEELYKITG

SEQ ID NO: 6101 - protein, 7 aa, Artificial
  helical interface sequence
KKLADMY

SEQ ID NO: 6102 - protein, 22 aa, Artificial
  helical interface sequence
LERTRAELDTVCRHNYEKTETP

SEQ ID NO: 6103 - protein, 26 aa, Artificial
  helical interface sequence
DEVALQGIEFWSNVCDEEMDLAIEAS

SEQ ID NO: 6104 - protein, 6 aa, Artificial
  helical interface sequence
WTDGLT

SEQ ID NO: 6105 - protein, 15 aa, Artificial
  helical interface sequence
AKNYGRAVYECLRGG

SEQ ID NO: 6106 - protein, 6 aa, Artificial
  helical interface sequence
WTDGLT

SEQ ID NO: 6107 - protein, 6 aa, Artificial
  helical interface sequence
WTDGLT

SEQ ID NO: 6108 - protein, 21 aa, Artificial
  helical interface sequence
NAPGAAANRVALEACTQARNE

SEQ ID NO: 6109 - protein, 18 aa, Artificial
  helical interface sequence
PRAIHSWLTRAMYSRRSK

SEQ ID NO: 6110 - protein, 23 aa, Artificial
  helical interface sequence
AADTDMTTQLISSNLELHSLSTG

SEQ ID NO: 6111 - protein, 23 aa, Artificial
  helical interface sequence
ARLRKLEVEANNAFDQYRDLYFE

SEQ ID NO: 6112 - protein, 37 aa, Artificial; identical to SEQ ID NO: 1018
  helical interface sequence

SEQ ID NO: 6113 - protein, 6 aa, Artificial
  helical interface sequence
RCETAC

SEQ ID NO: 6114 - protein, 22 aa, Artificial
  helical interface sequence
AADTEAVTQLIGSNIELHSLYT

SEQ ID NO: 6115 - protein, 22 aa, Artificial
  helical interface sequence
AADTQAIADIVQYHLELYTSQY

SEQ ID NO: 6116 - protein, 15 aa, Artificial
  helical interface sequence
VVSALQMLKQHLFKY

SEQ ID NO: 6117 - protein, 20 aa, Artificial
  helical interface sequence
PENFRLLGNMIVIVLGHHLG

SEQ ID NO: 6118 - protein, 6 aa, Artificial
  helical interface sequence
ADVKSS

SEQ ID NO: 6119 - protein, 11 aa, Artificial
  helical interface sequence
RVTYKNVPNWH

SEQ ID NO: 6120 - protein, 11 aa, Artificial
  helical interface sequence
RKILNDLSSDA

SEQ ID NO: 6121 - protein, 15 aa, Artificial
  helical interface sequence
EPVFWGLFGAGGMWS

SEQ ID NO: 6122 - protein, 17 aa, Artificial
  helical interface sequence
ATKTFEKNLNHLIEHNE

SEQ ID NO: 6123 - protein, 12 aa, Artificial
  helical interface sequence
ALKLVRESELLG

SEQ ID NO: 6124 - protein, 8 aa, Artificial
  helical interface sequence
QYANNLAG

SEQ ID NO: 6125 - protein, 45 aa, Artificial; identical to SEQ ID NO: 5208
  helical interface sequence

SEQ ID NO: 6126 - protein, 7 aa, Artificial
  helical interface sequence
LRPLSYP

SEQ ID NO: 6127 - protein, 35 aa, Artificial; identical to SEQ ID NO: 762
  helical interface sequence

SEQ ID NO: 6128 - protein, 10 aa, Artificial
  helical interface sequence
PEMAAVILKA

SEQ ID NO: 6129 - protein, 13 aa, Artificial
  helical interface sequence
EQEALEKLAAYVQ

SEQ ID NO: 6130 - protein, 14 aa, Artificial
  helical interface sequence
YHAWQHRQWVIQEF

SEQ ID NO: 6131 - protein, 10 aa, Artificial
  helical interface sequence
ESAWNYLKGI

SEQ ID NO: 6132 - protein, 39 aa, Artificial; identical to SEQ ID NO: 1789
  helical interface sequence

SEQ ID NO: 6133 - protein, 14 aa, Artificial
  helical interface sequence
EIQINSFISQLITS

SEQ ID NO: 6134 - protein, 14 aa, Artificial
  helical interface sequence
LGDLPPILNRKRAQ

SEQ ID NO: 6135 - protein, 30 aa, Artificial; identical to SEQ ID NO: 5077
  helical interface sequence

SEQ ID NO: 6136 - protein, 12 aa, Artificial
  helical interface sequence
ASQKALKEKEKA

SEQ ID NO: 6137 - protein, 25 aa, Artificial
  helical interface sequence
PAMMWALGFIFLFTVGGLTGIVLAN

SEQ ID NO: 6138 - protein, 30 aa, Artificial; identical to SEQ ID NO: 5077
  helical interface sequence

SEQ ID NO: 6139 - protein, 7 aa, Artificial
  helical interface sequence
CQLRCSS

SEQ ID NO: 6140 - protein, 14 aa, Artificial
  helical interface sequence
ATDRCCFVHDCCYG

SEQ ID NO: 6141 - protein, 18 aa, Artificial
  helical interface sequence
PEMQKTWESYHLIRDSMR

SEQ ID NO: 6142 - protein, 11 aa, Artificial
  helical interface sequence
RDWAESTLMTQ

SEQ ID NO: 6143 - protein, 14 aa, Artificial
  helical interface sequence
YDALRRLLYMIYMS

SEQ ID NO: 6144 - protein, 21 aa, Artificial
  helical interface sequence
DIYPYIAGAVFLIGSWLRYDY

SEQ ID NO: 6145 - protein, 13 aa, Artificial
  helical interface sequence
KEFIEECRRVWLV

SEQ ID NO: 6146 - protein, 7 aa, Artificial
  helical interface sequence
EWWRSGN

SEQ ID NO: 6147 - protein, 7 aa, Artificial
  helical interface sequence
EWWRSGN

SEQ ID NO: 6148 - protein, 18 aa, Artificial
  helical interface sequence
IRDLISYGVIGLIKAVDN

SEQ ID NO: 6149 - protein, 10 aa, Artificial
  helical interface sequence
YEELREQLSS

SEQ ID NO: 6150 - protein, 10 aa, Artificial
  helical interface sequence
YEELREQLSS

SEQ ID NO: 6151 - protein, 19 aa, Artificial
  helical interface sequence
SKLRGHAITLTYALNNFVD

SEQ ID NO: 6152 - protein, 13 aa, Artificial
  helical interface sequence
NEMDENLEQVSGI

SEQ ID NO: 6153 - protein, 20 aa, Artificial
  helical interface sequence
ENLYDDRVFRIKRALDLSMR

SEQ ID NO: 6154 - protein, 12 aa, Artificial
  helical interface sequence
LTARLYSLLFRR

SEQ ID NO: 6155 - protein, 15 aa, Artificial
  helical interface sequence
FDEIKKYVNTFMKSG

SEQ ID NO: 6156 - protein, 16 aa, Artificial
  helical interface sequence
WAAIAARSFFDDMMMT

SEQ ID NO: 6157 - protein, 18 aa, Artificial
  helical interface sequence
WNDTWGQCWDVITDNLVN

SEQ ID NO: 6158 - protein, 16 aa, Artificial
  helical interface sequence
DTQLQQIVDKTIINAD

SEQ ID NO: 6159 - protein, 15 aa, Artificial
  helical interface sequence
ESFARVTVAAFVAQL

SEQ ID NO: 6160 - protein, 14 aa, Artificial
  helical interface sequence
TEVKQKLQEFLLSK

SEQ ID NO: 6161 - protein, 10 aa, Artificial
  helical interface sequence
QAMVIEAIKA

SEQ ID NO: 6162 - protein, 10 aa, Artificial
  helical interface sequence
TFQMAILLQY

SEQ ID NO: 6163 - protein, 56 aa, Artificial
  helical interface sequence
EGVKGAASGVVGELARARLALDERGQKLSDLEERTAAMMSSADSFSKHAHEMMLKY

SEQ ID NO: 6164 - protein, 6 aa, Artificial
  helical interface sequence
WTDGLT

SEQ ID NO: 6165 - protein, 10 aa, Artificial
  helical interface sequence
PAYRSRVVKE

SEQ ID NO: 6166 - protein, 19 aa, Artificial
  helical interface sequence
PDAHVSLDKFLASVALALA

SEQ ID NO: 6167 - protein, 16 aa, Artificial
  helical interface sequence
YEDIGPKALARCLIVY

SEQ ID NO: 6168 - protein, 16 aa, Artificial
  helical interface sequence
YEDIGPKALARCLIVY

SEQ ID NO: 6169 - protein, 14 aa, Artificial
  helical interface sequence
EEWVAKQTKRMLDM

SEQ ID NO: 6170 - protein, 25 aa, Artificial
  helical interface sequence
VPLLNTSVLLASGVSITWAHHSLME

SEQ ID NO: 6171 - protein, 15 aa, Artificial
  helical interface sequence
PEIALELLMAANFLD

SEQ ID NO: 6172 - protein, 24 aa, Artificial
  helical interface sequence
PLFNQILTLQQSIKQLKGQLNHIL

SEQ ID NO: 6173 - protein, 18 aa, Artificial
  helical interface sequence
SLVFSFLYKVVQVFSEYF

SEQ ID NO: 6174 - protein, 18 aa, Artificial
  helical interface sequence
SLVFSFLYKVVQVFSEYF

SEQ ID NO: 6175 - protein, 21 aa, Artificial
  helical interface sequence
NAPGAAANRVALEACVQARNE

SEQ ID NO: 6176 - protein, 15 aa, Artificial
  helical interface sequence
LKDAINEALRDWVAT

SEQ ID NO: 6177 - protein, 20 aa, Artificial
  helical interface sequence
KAMKKWVESITKIIQRKKIA

SEQ ID NO: 6178 - protein, 12 aa, Artificial
  helical interface sequence
FILREKITHFDH

SEQ ID NO: 6179 - protein, 13 aa, Artificial
  helical interface sequence
FHRRELWEAIEAG

SEQ ID NO: 6180 - protein, 18 aa, Artificial
  helical interface sequence
PLLQGRLFSYTDTQISRL

SEQ ID NO: 6181 - protein, 9 aa, Artificial
  helical interface sequence
SQKLFDLRG

SEQ ID NO: 6182 - protein, 22 aa, Artificial
  helical interface sequence
ATDVTTLNEMFRYKTNLYKLKE

SEQ ID NO: 6183 - protein, 8 aa, Artificial
  helical interface sequence
YYSYYYSS

SEQ ID NO: 6184 - protein, 15 aa, Artificial
  helical interface sequence
VSELAELVKKLEDKF

SEQ ID NO: 6185 - protein, 21 aa, Artificial
  helical interface sequence
GALANIAVDKANLEIMTKRSN

SEQ ID NO: 6186 - protein, 8 aa, Artificial
  helical interface sequence
ERELLESY

SEQ ID NO: 6187 - protein, 12 aa, Artificial
  helical interface sequence
GDNILRLYGEAR

SEQ ID NO: 6188 - protein, 10 aa, Artificial
  helical interface sequence
MLEQYFDMIT

SEQ ID NO: 6189 - protein, 17 aa, Artificial
  helical interface sequence
ASLTKERGRLVDMMTDS

SEQ ID NO: 6190 - protein, 13 aa, Artificial
  helical interface sequence
YAAKLLFQELMAM

SEQ ID NO: 6191 - protein, 17 aa, Artificial
  helical interface sequence
RRKVSIAEEAIYLIEQE

SEQ ID NO: 6192 - protein, 15 aa, Artificial
  helical interface sequence
VSKAAADLMAYCEAH

SEQ ID NO: 6193 - protein, 12 aa, Artificial
  helical interface sequence
ADQIQECFQIFD

SEQ ID NO: 6194 - protein, 6 aa, Artificial
  helical interface sequence
PRCAWR

SEQ ID NO: 6195 - protein, 13 aa, Artificial
  helical interface sequence
AYQSFEQVVNELF

SEQ ID NO: 6196 - protein, 27 aa, Artificial
  helical interface sequence
DDQEEEIQDILKDVEETIVDLDRSIIV

SEQ ID NO: 6197 - protein, 17 aa, Artificial
  helical interface sequence
LQLVGTAAMLLASKFEE

SEQ ID NO: 6198 - protein, 14 aa, Artificial
  helical interface sequence
TLERIEIIRDLRLG

SEQ ID NO: 6199 - protein, 17 aa, Artificial
  helical interface sequence
DALADDLKTYGSEVLPN

SEQ ID NO: 6200 - protein, 13 aa, Artificial
  helical interface sequence
PLDEIKRAFQLFD

SEQ ID NO: 6201 - protein, 26 aa, Artificial
  helical interface sequence
PLLDGLVLGLVFATLGGLFYAAYQQY

SEQ ID NO: 6202 - protein, 24 aa, Artificial
  helical interface sequence
IDVLGWVALLVVFTWSIAMVVWGR

SEQ ID NO: 6203 - protein, 12 aa, Artificial
  helical interface sequence
EADWKRELDAIA

SEQ ID NO: 6204 - protein, 29 aa, Artificial
  helical interface sequence
ADEIRTLVKDMWDTRIAKLRVSADSFVRQ

SEQ ID NO: 6205 - protein, 20 aa, Artificial
  helical interface sequence
IVEFLNRWITFAQSIISTLT

SEQ ID NO: 6206 - protein, 14 aa, Artificial
  helical interface sequence
QSESIATNLIEMAS

SEQ ID NO: 6207 - protein, 8 aa, Artificial
  helical interface sequence
IEDRQKLD

SEQ ID NO: 6208 - protein, 12 aa, Artificial
  helical interface sequence
HKWAMIAVKEAT

SEQ ID NO: 6209 - protein, 32 aa, Artificial; identical to SEQ ID NO: 6008
  helical interface sequence

SEQ ID NO: 6210 - protein, 32 aa, Artificial; identical to SEQ ID NO: 6008
  helical interface sequence

SEQ ID NO: 6211 - protein, 27 aa, Artificial
  helical interface sequence
RDECKRILRKLELEAYAGVISALRAQG

SEQ ID NO: 6212 - protein, 16 aa, Artificial
  helical interface sequence
LVLQSHLGHLADQHIQ

SEQ ID NO: 6213 - protein, 19 aa, Artificial
  helical interface sequence
PKFSAHALRILNGLDLAIN

SEQ ID NO: 6214 - protein, 19 aa, Artificial
  helical interface sequence
YLVKNQNLHIDYLAKKLHD

SEQ ID NO: 6215 - protein, 11 aa, Artificial
  helical interface sequence
KTLQDIVYKLV

SEQ ID NO: 6216 - protein, 16 aa, Artificial
  helical interface sequence
AQEFLRFLLDGLHNEV

SEQ ID NO: 6217 - protein, 16 aa, Artificial
  helical interface sequence
GGNYGPTVLVQQEALK

SEQ ID NO: 6218 - protein, 11 aa, Artificial
  helical interface sequence
GTVALREIRRY

SEQ ID NO: 6219 - protein, 14 aa, Artificial
  helical interface sequence
RSTVAQLVQTLEQH

SEQ ID NO: 6220 - protein, 8 aa, Artificial
  helical interface sequence
RETAASLL

SEQ ID NO: 6221 - protein, 17 aa, Artificial
  helical interface sequence
LAWKIAKMIVSDVMQQC

SEQ ID NO: 6222 - protein, 11 aa, Artificial
  helical interface sequence
LGQLVEAAIQA

SEQ ID NO: 6223 - protein, 9 aa, Artificial
  helical interface sequence
SLESCLKFA

SEQ ID NO: 6224 - protein, 6 aa, Artificial
  helical interface sequence
PALVFN

SEQ ID NO: 6225 - protein, 6 aa, Artificial
  helical interface sequence
YNVALE

SEQ ID NO: 6226 - protein, 36 aa, Artificial; identical to SEQ ID NO: 581
  helical interface sequence

SEQ ID NO: 6227 - protein, 11 aa, Artificial
  helical interface sequence
AEQAKIAEEAG

SEQ ID NO: 6228 - protein, 21 aa, Artificial
  helical interface sequence
EDGIKNFFTDVYDLYIKFAMN

SEQ ID NO: 6229 - protein, 26 aa, Artificial
  helical interface sequence
ALSIHRLGLFLASNIFLTGAFGTIAS

SEQ ID NO: 6230 - protein, 14 aa, Artificial
  helical interface sequence
RSTVAQLVKRLTDA

SEQ ID NO: 6231 - protein, 7 aa, Artificial
  helical interface sequence
ELEQIAD

SEQ ID NO: 6232 - protein, 23 aa, Artificial
  helical interface sequence
VQEVEMLREKIYGVLEEYTRTTH

SEQ ID NO: 6233 - protein, 11 aa, Artificial
  helical interface sequence
RLPALRSIGLK

SEQ ID NO: 6234 - protein, 29 aa, Artificial
  helical interface sequence
FGDFLTVMTQKMSEKDTKEEILKAFKLFD

SEQ ID NO: 6235 - protein, 6 aa, Artificial
  helical interface sequence
ENQWAF

SEQ ID NO: 6236 - protein, 14 aa, Artificial
  helical interface sequence
EEEEEVRRENQWAF

SEQ ID NO: 6237 - protein, 14 aa, Artificial
  helical interface sequence
LNVLLAEIALIGTG

SEQ ID NO: 6238 - protein, 18 aa, Artificial
  helical interface sequence
GGLINKKCYEMASHLRRS

SEQ ID NO: 6239 - protein, 22 aa, Artificial
  helical interface sequence
LASLKSEAESLKGKLEEERAKL

SEQ ID NO: 6240 - protein, 13 aa, Artificial
  helical interface sequence
EADEAQFVAGRIR

SEQ ID NO: 6241 - protein, 15 aa, Artificial
  helical interface sequence
IYDRLLEQQLQSINL

SEQ ID NO: 6242 - protein, 12 aa, Artificial
  helical interface sequence
QDQVDDLLDSLG

SEQ ID NO: 6243 - protein, 17 aa, Artificial
  helical interface sequence
GPSKLIAPVIDELAKEY

SEQ ID NO: 6244 - protein, 8 aa, Artificial
  helical interface sequence
VWHYLTLH

SEQ ID NO: 6245 - protein, 7 aa, Artificial
  helical interface sequence
SSSKKYF

SEQ ID NO: 6246 - protein, 19 aa, Artificial
  helical interface sequence
DGVVACAAGLIGDLCTAFG

SEQ ID NO: 6247 - protein, 19 aa, Artificial
  helical interface sequence
NKAKTLATWATKELRKLKN

SEQ ID NO: 6248 - protein, 11 aa, Artificial
  helical interface sequence
VSDKRDISRFL

SEQ ID NO: 6249 - protein, 25 aa, Artificial
  helical interface sequence
RVTFRRIIVKNNAKKRKMFESFIES

SEQ ID NO: 6250 - protein, 6 aa, Artificial
  helical interface sequence
WWDFAD

SEQ ID NO: 6251 - protein, 12 aa, Artificial
  helical interface sequence
PLTDAVSTADSQ

SEQ ID NO: 6252 - protein, 12 aa, Artificial
  helical interface sequence
AFTKVAAQADTR

SEQ ID NO: 6253 - protein, 12 aa, Artificial
  helical interface sequence
AFTKVAAQADTR

SEQ ID NO: 6254 - protein, 12 aa, Artificial
  helical interface sequence
GATLHFQQLAVG

SEQ ID NO: 6255 - protein, 9 aa, Artificial
  helical interface sequence
LSRLLSYAG

SEQ ID NO: 6256 - protein, 5 aa, Artificial
  helical interface sequence
LEELF

SEQ ID NO: 6257 - protein, 13 aa, Artificial
  helical interface sequence
ALDFAGLKKYIMA

SEQ ID NO: 6258 - protein, 9 aa, Artificial
  helical interface sequence
DRLRPLSYP

SEQ ID NO: 6259 - protein, 20 aa, Artificial
  helical interface sequence
PTELFFHAAGGREGLVDTAV

SEQ ID NO: 6260 - protein, 12 aa, Artificial
  helical interface sequence
YCRHNYGVVESF

SEQ ID NO: 6261 - protein, 5 aa, Artificial
  helical interface sequence
KYELD

SEQ ID NO: 6262 - protein, 18 aa, Artificial
  helical interface sequence
PEDLFETISQALLNAADR

SEQ ID NO: 6263 - protein, 13 aa, Artificial
  helical interface sequence
VGELFWKVKEEEG

SEQ ID NO: 6264 - protein, 13 aa, Artificial
  helical interface sequence
FQVEYALEAIKQG

SEQ ID NO: 6265 - protein, 22 aa, Artificial
  helical interface sequence
PQLEGFSAESRKLLLIVQALRD

SEQ ID NO: 6266 - protein, 11 aa, Artificial
  helical interface sequence
IDNSVLKVVTN

SEQ ID NO: 6267 - protein, 7 aa, Artificial
  helical interface sequence
IPILEKI

SEQ ID NO: 6268 - protein, 22 aa, Artificial
  helical interface sequence
FDNFISCLVRLDAMFRAFRSLD

SEQ ID NO: 6269 - protein, 19 aa, Artificial
  helical interface sequence
LENFLERLKTIMREKYSKC

SEQ ID NO: 6270 - protein, 9 aa, Artificial
  helical interface sequence
EQVKSDIEN

SEQ ID NO: 6271 - protein, 9 aa, Artificial
  helical interface sequence
AYSYIRDAW

SEQ ID NO: 6272 - protein, 35 aa, Artificial; identical to SEQ ID NO: 651
  helical interface sequence

SEQ ID NO: 6273 - protein, 17 aa, Artificial
  helical interface sequence
SHVLSKVCMYFTYKVRY

SEQ ID NO: 6274 - protein, 7 aa, Artificial
  helical interface sequence
LFFPHEY

SEQ ID NO: 6275 - protein, 16 aa, Artificial
  helical interface sequence
AGDLGGEALERLFITY

SEQ ID NO: 6276 - protein, 16 aa, Artificial
  helical interface sequence
VADCGAEALARLLIVY

SEQ ID NO: 6277 - protein, 12 aa, Artificial
  helical interface sequence
TFQLAVLFAWNQ

SEQ ID NO: 6278 - protein, 13 aa, Artificial
  helical interface sequence
FNLKEQYEIYKEK

SEQ ID NO: 6279 - protein, 19 aa, Artificial
  helical interface sequence
FRNTLHFHIKASKAYMHQR

SEQ ID NO: 6280 - protein, 24 aa, Artificial
  helical interface sequence
AAEYYRAYLEGECVEWLHRYLKNG

SEQ ID NO: 6281 - protein, 14 aa, Artificial
  helical interface sequence
LVFWLGVYAVFFAR

SEQ ID NO: 6282 - protein, 33 aa, Artificial; identical to SEQ ID NO: 2186
  helical interface sequence

SEQ ID NO: 6283 - protein, 12 aa, Artificial
  helical interface sequence
IEPAQEEHEKYH

SEQ ID NO: 6284 - protein, 11 aa, Artificial
  helical interface sequence
QEVKMVAWWIG

SEQ ID NO: 6285 - protein, 11 aa, Artificial
  helical interface sequence
QEVKMVAWWIG

SEQ ID NO: 6286 - protein, 9 aa, Artificial
  helical interface sequence
PLLSEIWDV

SEQ ID NO: 6287 - protein, 7 aa, Artificial
  helical interface sequence
SADMRFF

SEQ ID NO: 6288 - protein, 11 aa, Artificial
  helical interface sequence
PLTVAGFLLGM

SEQ ID NO: 6289 - protein, 16 aa, Artificial
  helical interface sequence
VGEYGAEALERMFLSF

SEQ ID NO: 6290 - protein, 12 aa, Artificial
  helical interface sequence
VFYLHSRLLERA

SEQ ID NO: 6291 - protein, 7 aa, Artificial
  helical interface sequence
VFYLHSR

SEQ ID NO: 6292 - protein, 13 aa, Artificial
  helical interface sequence
PLDEIKRAFQLFD

SEQ ID NO: 6293 - protein, 14 aa, Artificial
  helical interface sequence
WVDKVKDLTKSEMN

SEQ ID NO: 6294 - protein, 16 aa, Artificial
  helical interface sequence
WVDKVKDLTKSEMNIN

SEQ ID NO: 6295 - protein, 13 aa, Artificial
  helical interface sequence
WVDKVKDLTKSEM

SEQ ID NO: 6296 - protein, 22 aa, Artificial
  helical interface sequence
KDNTDAVEVLTELNTKVERAAL

SEQ ID NO: 6297 - protein, 19 aa, Artificial
  helical interface sequence
QTQLRQAVQLLTRTELTLK

SEQ ID NO: 6298 - protein, 11 aa, Artificial
  helical interface sequence
REWVLKIAKLA

SEQ ID NO: 6299 - protein, 7 aa, Artificial
  helical interface sequence
PEYFIKG

SEQ ID NO: 6300 - protein, 6 aa, Artificial
  helical interface sequence
FAYVMA

SEQ ID NO: 6301 - protein, 10 aa, Artificial
  helical interface sequence
ESTQLLMKYL

SEQ ID NO: 6302 - protein, 13 aa, Artificial
  helical interface sequence
ADERAAAKVKYLT

SEQ ID NO: 6303 - protein, 14 aa, Artificial
  helical interface sequence
AATLEEKLNKIFEK

SEQ ID NO: 6304 - protein, 13 aa, Artificial
  helical interface sequence
TVALREIRRYQKS

SEQ ID NO: 6305 - protein, 12 aa, Artificial
  helical interface sequence
SREIQTAVRLLL

SEQ ID NO: 6306 - protein, 9 aa, Artificial
  helical interface sequence
VHAYLAEFD

SEQ ID NO: 6307 - protein, 11 aa, Artificial
  helical interface sequence
TAIVTQINHAI

SEQ ID NO: 6308 - protein, 31 aa, Artificial; identical to SEQ ID NO: 1463
  helical interface sequence

SEQ ID NO: 6309 - protein, 9 aa, Artificial
  helical interface sequence
EEEVEQLVA

SEQ ID NO: 6310 - protein, 9 aa, Artificial
  helical interface sequence
FPEFLTMMA

SEQ ID NO: 6311 - protein, 27 aa, Artificial
  helical interface sequence
STEIQTAFGRFRQASASLAAAKALTEK

SEQ ID NO: 6312 - protein, 7 aa, Artificial
  helical interface sequence
HNAMRLI

SEQ ID NO: 6313 - protein, 7 aa, Artificial
  helical interface sequence
PWCREGA

SEQ ID NO: 6314 - protein, 22 aa, Artificial
  helical interface sequence
PEDMSILQGYADGMNAWIDKVN

SEQ ID NO: 6315 - protein, 11 aa, Artificial
  helical interface sequence
AMDVVYALKRQ

SEQ ID NO: 6316 - protein, 19 aa, Artificial
  helical interface sequence
PEVQASWQKMVTGVASALS

SEQ ID NO: 6317 - protein, 22 aa, Artificial
  helical interface sequence
IPDARNAALRAKAEAAEFRYKY

SEQ ID NO: 6318 - protein, 23 aa, Artificial
  helical interface sequence
AGDTVQFAEYIQANIQLYSIRED

SEQ ID NO: 6319 - protein, 15 aa, Artificial
  helical interface sequence
INSAARNIQHLLYGK

SEQ ID NO: 6320 - protein, 5 aa, Artificial
  helical interface sequence
DRLRP

SEQ ID NO: 6321 - protein, 21 aa, Artificial
  helical interface sequence
AKEYARMEAVKDERQFGSLQD

SEQ ID NO: 6322 - protein, 12 aa, Artificial
  helical interface sequence
GQIDYALTAVKQ

SEQ ID NO: 6323 - protein, 22 aa, Artificial
  helical interface sequence
AADTEAVTQLIGSNIELHSLYT

SEQ ID NO: 6324 - protein, 18 aa, Artificial
  helical interface sequence
PEDLFETISQALLNAADR

SEQ ID NO: 6325 - protein, 15 aa, Artificial
  helical interface sequence
AGRGVITAINFLEEE

SEQ ID NO: 6326 - protein, 13 aa, Artificial
  helical interface sequence
ADAFTLFELFERK

SEQ ID NO: 6327 - protein, 44 aa, Artificial
  helical interface sequence
HAKVRKHQRKFLQAIHQLRSVKMEQRKLNDQANTLVDLAKTQLH

SEQ ID NO: 6328 - protein, 34 aa, Artificial
  helical interface sequence
PTVDVALIVYLDLVTKVGFGFIALDAAATLRAEH

SEQ ID NO: 6329 - protein, 11 aa, Artificial
  helical interface sequence
RICLRELAHKG

SEQ ID NO: 6330 - protein, 11 aa, Artificial
  helical interface sequence
QQGIELEIENI

SEQ ID NO: 6331 - protein, 12 aa, Artificial
  helical interface sequence
TLFELFERKLEM

SEQ ID NO: 6332 - protein, 22 aa, Artificial
  helical interface sequence
AQGALANIAVDKANLEIMTKRS

SEQ ID NO: 6333 - protein, 11 aa, Artificial
  helical interface sequence
LNQLKEVFSGI

SEQ ID NO: 6334 - protein, 14 aa, Artificial
  helical interface sequence
AKNYGRAVYECLRG

SEQ ID NO: 6335 - protein, 6 aa, Artificial
  helical interface sequence
WTDGLT

SEQ ID NO: 6336 - protein, 15 aa, Artificial
  helical interface sequence
CEQLVTALCDIKQAY

SEQ ID NO: 6337 - protein, 11 aa, Artificial
  helical interface sequence
PEERLLRSIFG

SEQ ID NO: 6338 - protein, 16 aa, Artificial
  helical interface sequence
STSDPVRQYLHEIGQV

SEQ ID NO: 6339 - protein, 18 aa, Artificial
  helical interface sequence
REAEERRGEKGRALSTRA

SEQ ID NO: 6340 - protein, 17 aa, Artificial
  helical interface sequence
RGYWQELIETLVWAHER

SEQ ID NO: 6341 - protein, 22 aa, Artificial
  helical interface sequence
AADTQAIADIVQYHLELYTSQY

SEQ ID NO: 6342 - protein, 6 aa, Artificial
  helical interface sequence
PWTQRY

SEQ ID NO: 6343 - protein, 6 aa, Artificial
  helical interface sequence
LIEEWA

SEQ ID NO: 6344 - protein, 10 aa, Artificial
  helical interface sequence
VSQALLWACQ

SEQ ID NO: 6345 - protein, 18 aa, Artificial
  helical interface sequence
DSVLFYAITTLHNLLLHQ

SEQ ID NO: 6346 - protein, 19 aa, Artificial
  helical interface sequence
QTQLRQAVQLLTRTELTLK

SEQ ID NO: 6347 - protein, 28 aa, Artificial
  helical interface sequence
GCKLQDTLVRQERPIRKSIEDLRNTVDS

SEQ ID NO: 6348 - protein, 9 aa, Artificial
  helical interface sequence
ALHLAVIHQ

SEQ ID NO: 6349 - protein, 7 aa, Artificial
  helical interface sequence
TLLGWFG

SEQ ID NO: 6350 - protein, 34 aa, Artificial; identical to SEQ ID NO: 701
  helical interface sequence

SEQ ID NO: 6351 - protein, 12 aa, Artificial
  helical interface sequence
IVTKSIVNADAE

SEQ ID NO: 6352 - protein, 13 aa, Artificial
  helical interface sequence
YSSWHYRSCLLPQ

SEQ ID NO: 6353 - protein, 8 aa, Artificial
  helical interface sequence
IKEKFVIQ

SEQ ID NO: 6354 - protein, 11 aa, Artificial
  helical interface sequence
PEMAAVILKAL

SEQ ID NO: 6355 - protein, 10 aa, Artificial
  helical interface sequence
PLWKGMKRVF

SEQ ID NO: 6356 - protein, 9 aa, Artificial
  helical interface sequence
QAVLSLYAS

SEQ ID NO: 6357 - protein, 9 aa, Artificial
  helical interface sequence
QAVLSLYAS

SEQ ID NO: 6358 - protein, 8 aa, Artificial
  helical interface sequence
TFLMEMLE

SEQ ID NO: 6359 - protein, 29 aa, Artificial
  helical interface sequence
KDAKECVQECVSEFISFITSEASERCHQE

SEQ ID NO: 6360 - protein, 13 aa, Artificial
  helical interface sequence
ESAWNYLKGILQD

SEQ ID NO: 6361 - protein, 13 aa, Artificial
  helical interface sequence
IDQVINSAAKTYY

SEQ ID NO: 6362 - protein, 11 aa, Artificial
  helical interface sequence
KSELEYYAMLS

SEQ ID NO: 6363 - protein, 8 aa, Artificial
  helical interface sequence
LEKEVESM

SEQ ID NO: 6364 - protein, 9 aa, Artificial
  helical interface sequence
QAVLSLYAS

SEQ ID NO: 6365 - protein, 11 aa, Artificial
  helical interface sequence
KEIYPYVIQEL

SEQ ID NO: 6366 - protein, 10 aa, Artificial
  helical interface sequence
ARTWRFLTFG

SEQ ID NO: 6367 - protein, 16 aa, Artificial
  helical interface sequence
FASAVRILEVVKDKAG

SEQ ID NO: 6368 - protein, 11 aa, Artificial
  helical interface sequence
KEIYPYVIQEL

SEQ ID NO: 6369 - protein, 11 aa, Artificial
  helical interface sequence
QKAFNLLVVRY

SEQ ID NO: 6370 - protein, 6 aa, Artificial
  helical interface sequence
MMELAE

SEQ ID NO: 6371 - protein, 14 aa, Artificial
  helical interface sequence
LGPALKICNLVNKV

SEQ ID NO: 6372 - protein, 28 aa, Artificial
  helical interface sequence
GLWLIASFFMFVAVWSWWGRTYLRAQAL

SEQ ID NO: 6373 - protein, 22 aa, Artificial
  helical interface sequence
YNEFENLRRAGIVHADMRGYSY

SEQ ID NO: 6374 - protein, 6 aa, Artificial
  helical interface sequence
YPRIEA

SEQ ID NO: 6375 - protein, 32 aa, Artificial; identical to SEQ ID NO: 1328
  helical interface sequence

SEQ ID NO: 6376 - protein, 22 aa, Artificial
  helical interface sequence
PLAVEGQTQGGVWMGMGQALSE

SEQ ID NO: 6377 - protein, 10 aa, Artificial
  helical interface sequence
YEELREQLSS

SEQ ID NO: 6378 - protein, 8 aa, Artificial
  helical interface sequence
FQEVWGRS

SEQ ID NO: 6379 - protein, 22 aa, Artificial
  helical interface sequence
IPDARNAALRAKAEAAEFRYKY

SEQ ID NO: 6380 - protein, 20 aa, Artificial
  helical interface sequence
DSQKKAIERMKDTLRIAYLT

SEQ ID NO: 6381 - protein, 14 aa, Artificial
  helical interface sequence
FACIIALFFFAIFF

SEQ ID NO: 6382 - protein, 19 aa, Artificial
  helical interface sequence
ESEVLRGKNLLRNALVSHL

SEQ ID NO: 6383 - protein, 16 aa, Artificial
  helical interface sequence
EEYNSQLLSFVRDLNQ

SEQ ID NO: 6384 - protein, 7 aa, Artificial
  helical interface sequence
GEVFIRA

SEQ ID NO: 6385 - protein, 13 aa, Artificial
  helical interface sequence
AENFETFCEQLLA

SEQ ID NO: 6386 - protein, 6 aa, Artificial
  helical interface sequence
VLTKRS

SEQ ID NO: 6387 - protein, 13 aa, Artificial
  helical interface sequence
TEFEYLRKVLFEY

SEQ ID NO: 6388 - protein, 6 aa, Artificial
  helical interface sequence
WTDGLT

SEQ ID NO: 6389 - protein, 15 aa, Artificial
  helical interface sequence
AKNYGRAVYECLRGG

SEQ ID NO: 6390 - protein, 16 aa, Artificial
  helical interface sequence
ADAIGADALGRMLAVY

SEQ ID NO: 6391 - protein, 30 aa, Artificial; identical to SEQ ID NO: 4094
  helical interface sequence

SEQ ID NO: 6392 - protein, 5 aa, Artificial
  helical interface sequence
LEWLN

SEQ ID NO: 6393 - protein, 14 aa, Artificial
  helical interface sequence
EEWVAKQTKRMLDM

SEQ ID NO: 6394 - protein, 25 aa, Artificial
  helical interface sequence
VPLLNTSVLLASGVSITWAHHSLME

SEQ ID NO: 6395 - protein, 12 aa, Artificial
  helical interface sequence
PKVLQRLIRSRG

SEQ ID NO: 6396 - protein, 8 aa, Artificial
  helical interface sequence
YNPIYRAG

SEQ ID NO: 6397 - protein, 19 aa, Artificial
  helical interface sequence
ETLIEPLKELEKAYKRFKD

SEQ ID NO: 6398 - protein, 9 aa, Artificial
  helical interface sequence
PVVQALAAR

SEQ ID NO: 6399 - protein, 15 aa, Artificial
  helical interface sequence
EWKVLEELRRLAAQN

SEQ ID NO: 6400 - protein, 36 aa, Artificial; identical to SEQ ID NO: 1711
  helical interface sequence

SEQ ID NO: 6401 - protein, 21 aa, Artificial
  helical interface sequence
RTIESILEPVAQQISHLVIMH

SEQ ID NO: 6402 - protein, 23 aa, Artificial
  helical interface sequence
VGDAQVLVRYMKAELELYRLQRR

SEQ ID NO: 6403 - protein, 9 aa, Artificial
  helical interface sequence
QDGTWHQTI

SEQ ID NO: 6404 - protein, 5 aa, Artificial
  helical interface sequence
PHQWQ

SEQ ID NO: 6405 - protein, 20 aa, Artificial
  helical interface sequence
PEFKAHIARVLGGLDRVISM

SEQ ID NO: 6406 - protein, 9 aa, Artificial
  helical interface sequence
PEKIRSWSY

SEQ ID NO: 6407 - protein, 19 aa, Artificial
  helical interface sequence
KLHAKIDSVDEERYDTEVK

SEQ ID NO: 6408 - protein, 35 aa, Artificial; identical to SEQ ID NO: 2686
  helical interface sequence

SEQ ID NO: 6409 - protein, 35 aa, Artificial; identical to SEQ ID NO: 2686
  helical interface sequence

SEQ ID NO: 6410 - protein, 16 aa, Artificial
  helical interface sequence
VSELAELVKKLEDKFG

SEQ ID NO: 6411 - protein, 8 aa, Artificial
  helical interface sequence
WFSKLASS

SEQ ID NO: 6412 - protein, 29 aa, Artificial
  helical interface sequence
SSAVMALQEASEAYLVALFEDTNLCAIHA

SEQ ID NO: 6413 - protein, 12 aa, Artificial
  helical interface sequence
PQLMAAFIKQRT

SEQ ID NO: 6414 - protein, 45 aa, Artificial; identical to SEQ ID NO: 3977
  helical interface sequence

SEQ ID NO: 6415 - protein, 11 aa, Artificial
  helical interface sequence
VPERAQQWYAQ

SEQ ID NO: 6416 - protein, 16 aa, Artificial
  helical interface sequence
QGCVAYFRSYFNRHFR

SEQ ID NO: 6417 - protein, 17 aa, Artificial
  helical interface sequence
DILVDIKRDYVLSKLRD

SEQ ID NO: 6418 - protein, 17 aa, Artificial
  helical interface sequence
DAIKRIAYEFVEMKAKD

SEQ ID NO: 6419 - protein, 6 aa, Artificial
  helical interface sequence
PRCAWR

SEQ ID NO: 6420 - protein, 10 aa, Artificial
  helical interface sequence
VEYLRFALML

SEQ ID NO: 6421 - protein, 19 aa, Artificial
  helical interface sequence
ERQKVVEQMEHEMKEAAKA

SEQ ID NO: 6422 - protein, 5 aa, Artificial
  helical interface sequence
EWYRS

SEQ ID NO: 6423 - protein, 7 aa, Artificial
  helical interface sequence
LRPLSYP

SEQ ID NO: 6424 - protein, 38 aa, Artificial; identical to SEQ ID NO: 3463
  helical interface sequence

SEQ ID NO: 6425 - protein, 16 aa, Artificial
  helical interface sequence
YYGRWLLTAARILVDK

SEQ ID NO: 6426 - protein, 5 aa, Artificial
  helical interface sequence
EWYRS

SEQ ID NO: 6427 - protein, 9 aa, Artificial
  helical interface sequence
AEERRRKQN

SEQ ID NO: 6428 - protein, 11 aa, Artificial
  helical interface sequence
TYEQLARELLL

SEQ ID NO: 6429 - protein, 11 aa, Artificial
  helical interface sequence
RICLRELAHKG

SEQ ID NO: 6430 - protein, 15 aa, Artificial
  helical interface sequence
NADISQSLLQTFIGR

SEQ ID NO: 6431 - protein, 10 aa, Artificial
  helical interface sequence
LWLAINLKQR

SEQ ID NO: 6432 - protein, 19 aa, Artificial
  helical interface sequence
RGLFQTGQKGLNDFQCWEK

SEQ ID NO: 6433 - protein, 35 aa, Artificial
  helical interface sequence
PEAAARAAQMQQDDEAWQTRYQAYAAERDRIAAQG

SEQ ID NO: 6434 - protein, 35 aa, Artificial; identical to SEQ ID NO: 4770
  helical interface sequence

SEQ ID NO: 6435 - protein, 23 aa, Artificial
  helical interface sequence
KESTQKAIDGVTNKVNSIIDKMN

SEQ ID NO: 6436 - protein, 32 aa, Artificial; identical to SEQ ID NO: 6008
  helical interface sequence

SEQ ID NO: 6437 - protein, 45 aa, Artificial
  helical interface sequence
PVVMQLMEAAKPFVRWLTDLCVQLSEVERQIHEIVRAYEWAHHDM

SEQ ID NO: 6438 - protein, 22 aa, Artificial
  helical interface sequence
RRKPREEGLRHCLQIGVEALKA

SEQ ID NO: 6439 - protein, 25 aa, Artificial
  helical interface sequence
TAPVAAVQAAVSNLVRVGKETVQTT

SEQ ID NO: 6440 - protein, 8 aa, Artificial
  helical interface sequence
QLVIEFYS

SEQ ID NO: 6441 - protein, 11 aa, Artificial
  helical interface sequence
LGQLVEAAIQA

SEQ ID NO: 6442 - protein, 15 aa, Artificial
  helical interface sequence
EEELSSWYQSFLKEC

SEQ ID NO: 6443 - protein, 29 aa, Artificial
  helical interface sequence
ARYVNALKLFISGISPLEHAAFQGYSKVG

SEQ ID NO: 6444 - protein, 20 aa, Artificial
  helical interface sequence
PREWDKTYWEGKKVLQNLLD

SEQ ID NO: 6445 - protein, 28 aa, Artificial
  helical interface sequence
GWWLMAGLFMTLSLGSWWIRVYSRARAL

SEQ ID NO: 6446 - protein, 12 aa, Artificial
  helical interface sequence
VFYLHSRLLERA

SEQ ID NO: 6447 - protein, 13 aa, Artificial
  helical interface sequence
TVALREIRRYQKS

SEQ ID NO: 6448 - protein, 21 aa, Artificial
  helical interface sequence
DDHVQFLIYQILRGLKYIHSA

SEQ ID NO: 6449 - protein, 10 aa, Artificial
  helical interface sequence
PLLLKRRKKA

SEQ ID NO: 6450 - protein, 16 aa, Artificial
  helical interface sequence
ADDFLPTLIYIVLKGN

SEQ ID NO: 6451 - protein, 13 aa, Artificial
  helical interface sequence
WYIEALAQVFSER

SEQ ID NO: 6452 - protein, 13 aa, Artificial
  helical interface sequence
STAIREISLMKEL

SEQ ID NO: 6453 - protein, 19 aa, Artificial
  helical interface sequence
PQAKIAELENQVHRLEQEL

SEQ ID NO: 6454 - protein, 7 aa, Artificial
  helical interface sequence
TTFRILA

SEQ ID NO: 6455 - protein, 11 aa, Artificial
  helical interface sequence
PIQIYEKIVSG

SEQ ID NO: 6456 - protein, 9 aa, Artificial
  helical interface sequence
AYSYIRDAW

SEQ ID NO: 6457 - protein, 22 aa, Artificial
  helical interface sequence
VERLCFQIEQAHWFYEDFIRAQ

SEQ ID NO: 6458 - protein, 11 aa, Artificial
  helical interface sequence
WFVQALCSILE

SEQ ID NO: 6459 - protein, 21 aa, Artificial
  helical interface sequence
PEIHLSVDKFLQQLALALAEK

SEQ ID NO: 6460 - protein, 6 aa, Artificial
  helical interface sequence
YFYSKF

SEQ ID NO: 6461 - protein, 9 aa, Artificial
  helical interface sequence
WDGFVEFFH

SEQ ID NO: 6462 - protein, 12 aa, Artificial
  helical interface sequence
AFTKVAAQADTR

SEQ ID NO: 6463 - protein, 12 aa, Artificial
  helical interface sequence
AFTKVAAQADTR

SEQ ID NO: 6464 - protein, 12 aa, Artificial
  helical interface sequence
AFTKVAAQADTR

SEQ ID NO: 6465 - protein, 12 aa, Artificial
  helical interface sequence
HWFLNYILSNLN

SEQ ID NO: 6466 - protein, 17 aa, Artificial
  helical interface sequence
ATIISSVLQTILYHIEY

SEQ ID NO: 6467 - protein, 21 aa, Artificial
  helical interface sequence
TTAQKRVYSLMENDSYPRFLK

SEQ ID NO: 6468 - protein, 22 aa, Artificial
  helical interface sequence
TWPHIVAALVWLIDCIKIHTAM

SEQ ID NO: 6469 - protein, 7 aa, Artificial
  helical interface sequence
SEQLTSG

SEQ ID NO: 6470 - protein, 21 aa, Artificial
  helical interface sequence
WGRIVTIFAFGGVLLKKLKQE

SEQ ID NO: 6471 - protein, 13 aa, Artificial
  helical interface sequence
TEMANKAAEAVLK

SEQ ID NO: 6472 - protein, 15 aa, Artificial
  helical interface sequence
VKEVMHYLGQYIMVK

SEQ ID NO: 6473 - protein, 16 aa, Artificial
  helical interface sequence
IRNKIRAIGKMARVFS

SEQ ID NO: 6474 - protein, 11 aa, Artificial
  helical interface sequence
AAELRHVMTNL

SEQ ID NO: 6475 - protein, 11 aa, Artificial
  helical interface sequence
QEKFFQELFDS

SEQ ID NO: 6476 - protein, 7 aa, Artificial
  helical interface sequence
KGVFVLN

SEQ ID NO: 6477 - protein, 18 aa, Artificial
  helical interface sequence
PDLAKRYVELALEIQKKA

SEQ ID NO: 6478 - protein, 10 aa, Artificial
  helical interface sequence
QTFAYGVLDS

SEQ ID NO: 6479 - protein, 9 aa, Artificial
  helical interface sequence
VFALLFFFG

SEQ ID NO: 6480 - protein, 12 aa, Artificial
  helical interface sequence
AIYVYKVLKQVH

SEQ ID NO: 6481 - protein, 6 aa, Artificial
  helical interface sequence
HCINKM

SEQ ID NO: 6482 - protein, 16 aa, Artificial
  helical interface sequence
GARGLLKQLEISYKDK

SEQ ID NO: 6483 - protein, 23 aa, Artificial
  helical interface sequence
VADARVLVDFARISAQQEKVTYG

SEQ ID NO: 6484 - protein, 25 aa, Artificial
  helical interface sequence
DACIDQCLAKYMRSWNVISKAYISR

SEQ ID NO: 6485 - protein, 5 aa, Artificial
  helical interface sequence
DEDWL

SEQ ID NO: 6486 - protein, 22 aa, Artificial
  helical interface sequence
VATLCDLFDREIVVTISWAKSI

SEQ ID NO: 6487 - protein, 11 aa, Artificial
  helical interface sequence
VDGYDYTWKKD

SEQ ID NO: 6488 - protein, 19 aa, Artificial
  helical interface sequence
ENFRLLGNVLVCVLAHHFG

SEQ ID NO: 6489 - protein, 12 aa, Artificial
  helical interface sequence
VVTKSIVNADAE

SEQ ID NO: 6490 - protein, 17 aa, Artificial
  helical interface sequence
SHVLSKVCMYFTYKVRY

SEQ ID NO: 6491 - protein, 8 aa, Artificial
  helical interface sequence
ERELWEKE

SEQ ID NO: 6492 - protein, 19 aa, Artificial
  helical interface sequence
PEVHASLDKFVLAVGTVLT

SEQ ID NO: 6493 - protein, 17 aa, Artificial
  helical interface sequence
HGGEYGEEALQRMFAAF

SEQ ID NO: 6494 - protein, 30 aa, Artificial
  helical interface sequence
QQKIQAAEAELDLVTDMFNKLVNNCYKKCI

SEQ ID NO: 6495 - protein, 11 aa, Artificial
  helical interface sequence
IVRTLHQHKLG

SEQ ID NO: 6496 - protein, 15 aa, Artificial
  helical interface sequence
EMGFAGIAVGAAMAG

SEQ ID NO: 6497 - protein, 13 aa, Artificial
  helical interface sequence
GQIFEAYNMAALW

SEQ ID NO: 6498 - protein, 14 aa, Artificial
  helical interface sequence
EMGFAGIAVGAAMA

SEQ ID NO: 6499 - protein, 33 aa, Artificial; identical to SEQ ID NO: 2186
  helical interface sequence

SEQ ID NO: 6500 - protein, 17 aa, Artificial
  helical interface sequence
FHDSNVKNLYDKVRLQL

SEQ ID NO: 6501 - protein, 19 aa, Artificial
  helical interface sequence
DSTRETVLKQIREFLEEIV

SEQ ID NO: 6502 - protein, 9 aa, Artificial
  helical interface sequence
DRLRPLSYP

SEQ ID NO: 6503 - protein, 29 aa, Artificial
  helical interface sequence
GCRMKGLIDEVNQDFTNRINKLKNSLFEY

SEQ ID NO: 6504 - protein, 63 aa, Artificial; identical to SEQ ID NO: 2881
  helical interface sequence

SEQ ID NO: 6505 - protein, 14 aa, Artificial
  helical interface sequence
PEVIQAMTKAMWEA

SEQ ID NO: 6506 - protein, 11 aa, Artificial
  helical interface sequence
REWVLKIAKLA

SEQ ID NO: 6507 - protein, 21 aa, Artificial
  helical interface sequence
DIIAAAKRMALLMAEMSRLVR

SEQ ID NO: 6508 - protein, 44 aa, Artificial
  helical interface sequence
LQAGASQFETSAAKLKRKYWWKNLKMMIILGVICAIILIIIIVY

SEQ ID NO: 6509 - protein, 14 aa, Artificial
  helical interface sequence
LAMANSLRRVMIAE

SEQ ID NO: 6510 - protein, 13 aa, Artificial
  helical interface sequence
KDLKNTMQYLTNF

SEQ ID NO: 6511 - protein, 14 aa, Artificial
  helical interface sequence
RELVRAQIAICGMS

SEQ ID NO: 6512 - protein, 22 aa, Artificial
  helical interface sequence
PPSYVAHLASDFGVRVFQQVAQ

SEQ ID NO: 6513 - protein, 9 aa, Artificial
  helical interface sequence
RYTHFLTQH

SEQ ID NO: 6514 - protein, 12 aa, Artificial
  helical interface sequence
KEELKRSLYALF

SEQ ID NO: 6515 - protein, 13 aa, Artificial
  helical interface sequence
AITAVINSSDVQG

SEQ ID NO: 6516 - protein, 12 aa, Artificial
  helical interface sequence
AITAVINSSDVQ

SEQ ID NO: 6517 - protein, 22 aa, Artificial
  helical interface sequence
LDQLRQEAEQLKNQIRDARKAC

SEQ ID NO: 6518 - protein, 30 aa, Artificial
  helical interface sequence
LSRLFDNAMLRAHRLHQLAFDTYQEFEEAY

SEQ ID NO: 6519 - protein, 5 aa, Artificial
  helical interface sequence
PYLET

SEQ ID NO: 6520 - protein, 14 aa, Artificial
  helical interface sequence
FHCWDYRRFVAAQA

SEQ ID NO: 6521 - protein, 12 aa, Artificial
  helical interface sequence
AWPTKLEWERHK

SEQ ID NO: 6522 - protein, 19 aa, Artificial
  helical interface sequence
KMLQGRLFAYPDTHRHRLG

SEQ ID NO: 6523 - protein, 11 aa, Artificial
  helical interface sequence
KTERELLESYI

SEQ ID NO: 6524 - protein, 23 aa, Artificial
  helical interface sequence
VPKWNACAAVGTLAATLVNCGAG

SEQ ID NO: 6525 - protein, 6 aa, Artificial
  helical interface sequence
VDELVG

SEQ ID NO: 6526 - protein, 14 aa, Artificial
  helical interface sequence
MAHLKGAIYELAQA

SEQ ID NO: 6527 - protein, 14 aa, Artificial
  helical interface sequence
AIPTGVKIFNWLFT

SEQ ID NO: 6528 - protein, 22 aa, Artificial
  helical interface sequence
IPDARNAALRAKAEAAEFRYKY

SEQ ID NO: 6529 - protein, 16 aa, Artificial
  helical interface sequence
EKFRDVYDYFRAVLQR

SEQ ID NO: 6530 - protein, 13 aa, Artificial
  helical interface sequence
LLKSAVELAKDWR

SEQ ID NO: 6531 - protein, 25 aa, Artificial
  helical interface sequence
QRGKDKCARDIGYYLRMVTYCLIAG

SEQ ID NO: 6532 - protein, 8 aa, Artificial
  helical interface sequence
RKKWIHCF

SEQ ID NO: 6533 - protein, 10 aa, Artificial
  helical interface sequence
GCQVACKQWH

SEQ ID NO: 6534 - protein, 9 aa, Artificial
  helical interface sequence
IDTLILDTL

SEQ ID NO: 6535 - protein, 19 aa, Artificial
  helical interface sequence
PEVHAAFDKFLSAVSAVLA

SEQ ID NO: 6536 - protein, 12 aa, Artificial
  helical interface sequence
MDYAFQYVQDNG

SEQ ID NO: 6537 - protein, 14 aa, Artificial
  helical interface sequence
DEQIAAQVDYIVAN

SEQ ID NO: 6538 - protein, 6 aa, Artificial
  helical interface sequence
WTDGLT

SEQ ID NO: 6539 - protein, 6 aa, Artificial
  helical interface sequence
WTDGLT

SEQ ID NO: 6540 - protein, 6 aa, Artificial
  helical interface sequence
WTDGLT

SEQ ID NO: 6541 - protein, 14 aa, Artificial
  helical interface sequence
YQVEYAFKAINQGG

SEQ ID NO: 6542 - protein, 15 aa, Artificial
  helical interface sequence
LKHLADRVAMYVHAY

SEQ ID NO: 6543 - protein, 23 aa, Artificial
  helical interface sequence
TADSRSQVQRARYEAANWKYKYG

SEQ ID NO: 6544 - protein, 15 aa, Artificial
  helical interface sequence
CEQLVTALCDIKQAY

SEQ ID NO: 6545 - protein, 9 aa, Artificial
  helical interface sequence
TADARIVIN

SEQ ID NO: 6546 - protein, 23 aa, Artificial
  helical interface sequence
TADSRSQVQRARYEAANWKYKYG

SEQ ID NO: 6547 - protein, 22 aa, Artificial
  helical interface sequence
HGDCLTLTKIIEARLKMYKHSN

SEQ ID NO: 6548 - protein, 14 aa, Artificial
  helical interface sequence
DEQIKKQIDYMISK

SEQ ID NO: 6549 - protein, 15 aa, Artificial
  helical interface sequence
GKNYGRVVYEALKGG

SEQ ID NO: 6550 - protein, 46 aa, Artificial; identical to SEQ ID NO: 137
  helical interface sequence

SEQ ID NO: 6551 - protein, 15 aa, Artificial
  helical interface sequence
INSAARNIQHLLYGK

SEQ ID NO: 6552 - protein, 6 aa, Artificial
  helical interface sequence
LIEEWA

SEQ ID NO: 6553 - protein, 22 aa, Artificial
  helical interface sequence
TYHIISQLESFVNQQEALKNIL

SEQ ID NO: 6554 - protein, 9 aa, Artificial
  helical interface sequence
GYSHKLHEQ

SEQ ID NO: 6555 - protein, 9 aa, Artificial
  helical interface sequence
KDLLEQRRA

SEQ ID NO: 6556 - protein, 12 aa, Artificial
  helical interface sequence
ELGRPDAENWNS

SEQ ID NO: 6557 - protein, 11 aa, Artificial
  helical interface sequence
NDEICEAFRKD

SEQ ID NO: 6558 - protein, 24 aa, Artificial
  helical interface sequence
LASLAIYSFWIFLAGLIYYLQTEN

SEQ ID NO: 6559 - protein, 26 aa, Artificial
  helical interface sequence
TLGIHRLGLLLSLSAVFFSALCMIIT

SEQ ID NO: 6560 - protein, 27 aa, Artificial
  helical interface sequence
PFHGLSIAFLYGSALLFAMHGATILAV

SEQ ID NO: 6561 - protein, 27 aa, Artificial
  helical interface sequence
PFHGLSIAFLYGSALLFAMHGATILAV

SEQ ID NO: 6562 - protein, 19 aa, Artificial
  helical interface sequence
PDSLENIPEKWTPEVKHFC

SEQ ID NO: 6563 - protein, 33 aa, Artificial
  helical interface sequence
EEEAIAVHDQFKTTFSAFIILAAVAHVLVWVWK

SEQ ID NO: 6564 - protein, 33 aa, Artificial; identical to SEQ ID NO: 6563
  helical interface sequence

SEQ ID NO: 6565 - protein, 33 aa, Artificial; identical to SEQ ID NO: 6563
  helical interface sequence

SEQ ID NO: 6566 - protein, 33 aa, Artificial; identical to SEQ ID NO: 6563
  helical interface sequence

SEQ ID NO: 6567 - protein, 28 aa, Artificial
  helical interface sequence
PWMGLIGLVVVLYTMFGWWSDVVTESLE

SEQ ID NO: 6568 - protein, 9 aa, Artificial
  helical interface sequence
QAVLSLYAS

SEQ ID NO: 6569 - protein, 9 aa, Artificial
  helical interface sequence
QAVLSLYAS

SEQ ID NO: 6570 - protein, 11 aa, Artificial
  helical interface sequence
PERAAIIAAAV

SEQ ID NO: 6571 - protein, 30 aa, Artificial; identical to SEQ ID NO: 2910
  helical interface sequence

SEQ ID NO: 6572 - protein, 20 aa, Artificial
  helical interface sequence
YLWIEAKLEEKVAVLKARAF

SEQ ID NO: 6573 - protein, 13 aa, Artificial
  helical interface sequence
PLNAFDGALLNAG

SEQ ID NO: 6574 - protein, 7 aa, Artificial
  helical interface sequence
TFLMEML

SEQ ID NO: 6575 - protein, 13 aa, Artificial
  helical interface sequence
EKELNRIKRWCIM

SEQ ID NO: 6576 - protein, 11 aa, Artificial
  helical interface sequence
AWRLWKVGEQL

SEQ ID NO: 6577 - protein, 5 aa, Artificial
  helical interface sequence
LITSL

SEQ ID NO: 6578 - protein, 30 aa, Artificial
  helical interface sequence
HMNVKRRTHNVLERQRRNELKRSFFALRDQ

SEQ ID NO: 6579 - protein, 21 aa, Artificial
  helical interface sequence
LPHMADMSTYMFKGIISFAKV

SEQ ID NO: 6580 - protein, 24 aa, Artificial
  helical interface sequence
PEHDHRKRMGLKMLLMMGLLLPLV

SEQ ID NO: 6581 - protein, 9 aa, Artificial
  helical interface sequence
PWEQHAKWY

SEQ ID NO: 6582 - protein, 14 aa, Artificial
  helical interface sequence
EVRQFRRLFAQLAG

SEQ ID NO: 6583 - protein, 7 aa, Artificial
  helical interface sequence
HEWLRRA

SEQ ID NO: 6584 - protein, 13 aa, Artificial
  helical interface sequence
IREMLPVLEAVAK

SEQ ID NO: 6585 - protein, 29 aa, Artificial
  helical interface sequence
QSFLLKCLEQVRKIQGDGAALQEKLCATY

SEQ ID NO: 6586 - protein, 22 aa, Artificial
  helical interface sequence
VGDAQVLVRYMKAELELYRLQR

SEQ ID NO: 6587 - protein, 9 aa, Artificial
  helical interface sequence
RRFRKWFEA

SEQ ID NO: 6588 - protein, 25 aa, Artificial
  helical interface sequence
HVPLAFCVPIFMFCVLQVFRPLLLG

SEQ ID NO: 6589 - protein, 18 aa, Artificial
  helical interface sequence
WSMYSRLRKMLYLIYVAG

SEQ ID NO: 6590 - protein, 23 aa, Artificial
  helical interface sequence
AGIAIELVRLFAVELEHYEKIEG

SEQ ID NO: 6591 - protein, 23 aa, Artificial
  helical interface sequence
AGIAIELVRLFAVELEHYEKIEG

SEQ ID NO: 6592 - protein, 21 aa, Artificial
  helical interface sequence
EKDKAEHLMLVDLARNDLGKV

SEQ ID NO: 6593 - protein, 8 aa, Artificial
  helical interface sequence
YEELREQL

SEQ ID NO: 6594 - protein, 15 aa, Artificial
  helical interface sequence
VERAGHLLCDKAQKN

SEQ ID NO: 6595 - protein, 7 aa, Artificial
  helical interface sequence
LAYDVFG

SEQ ID NO: 6596 - protein, 27 aa, Artificial
  helical interface sequence
TVRWVAVHTLAVPTIFFLGAIAAMQFI

SEQ ID NO: 6597 - protein, 42 aa, Artificial; identical to SEQ ID NO: 4318
  helical interface sequence

SEQ ID NO: 6598 - protein, 10 aa, Artificial
  helical interface sequence
SVWIGGSILA

SEQ ID NO: 6599 - protein, 22 aa, Artificial
  helical interface sequence
WDQFMQDLDETHHGMHLGVWYW

SEQ ID NO: 6600 - protein, 5 aa, Artificial
  helical interface sequence
PLVKG

SEQ ID NO: 6601 - protein, 17 aa, Artificial
  helical interface sequence
PNILNCGEELFMAAERF

SEQ ID NO: 6602 - protein, 15 aa, Artificial
  helical interface sequence
ENFVISSYYEYQFWG

SEQ ID NO: 6603 - protein, 12 aa, Artificial
  helical interface sequence
PSVMPAEVAWAV

SEQ ID NO: 6604 - protein, 21 aa, Artificial
  helical interface sequence
RKAIDYIKYLQQVNHKLRQEN

SEQ ID NO: 6605 - protein, 6 aa, Artificial
  helical interface sequence
WTDGLT

SEQ ID NO: 6606 - protein, 6 aa, Artificial
  helical interface sequence
WTDGLT

SEQ ID NO: 6607 - protein, 6 aa, Artificial
  helical interface sequence
WTDGLT

SEQ ID NO: 6608 - protein, 6 aa, Artificial
  helical interface sequence
WTDGLT

SEQ ID NO: 6609 - protein, 6 aa, Artificial
  helical interface sequence
WTDGLT

SEQ ID NO: 6610 - protein, 6 aa, Artificial
  helical interface sequence
WTDGLT

SEQ ID NO: 6611 - protein, 21 aa, Artificial
  helical interface sequence
PDAHVSLDKFLASVALALAER

SEQ ID NO: 6612 - protein, 19 aa, Artificial
  helical interface sequence
VETQCAFQKFLAVVVFALG

SEQ ID NO: 6613 - protein, 6 aa, Artificial
  helical interface sequence
LVEICQ

SEQ ID NO: 6614 - protein, 15 aa, Artificial
  helical interface sequence
PEIALELLMAANFLD

SEQ ID NO: 6615 - protein, 13 aa, Artificial
  helical interface sequence
RDFQNAFKIHNAV

SEQ ID NO: 6616 - protein, 14 aa, Artificial
  helical interface sequence
DNGAKYLIDVLQKD

SEQ ID NO: 6617 - protein, 25 aa, Artificial
  helical interface sequence
VRWVAVHTLAVPTIFFLGAIAAMQF

SEQ ID NO: 6618 - protein, 25 aa, Artificial
  helical interface sequence
VRWVAVHTLAVPTIFFLGAIAAMQF

SEQ ID NO: 6619 - protein, 15 aa, Artificial
  helical interface sequence
QLTALMGAMYLAALG

SEQ ID NO: 6620 - protein, 19 aa, Artificial
  helical interface sequence
GAHGELTGILIIRAYHEDR

SEQ ID NO: 6621 - protein, 11 aa, Artificial
  helical interface sequence
PEAVRRALAER

SEQ ID NO: 6622 - protein, 10 aa, Artificial
  helical interface sequence
GSNPATASMA

SEQ ID NO: 6623 - protein, 88 aa, Artificial
  helical interface sequence
TRDQVKKLQLMLRQANDQLEKTMKDKQELEDFIKQSSEDSSHQISALVLRAQASEILLEELQQGLSQAKRDVQEQMAVLMQSREQVSE

SEQ ID NO: 6624 - protein, 81 aa, Artificial
  helical interface sequence
RDQVKKLQLMLRQANDQLEKTMKDKQELEDFIKQSSEDSSHQISALVLRAQASEILLEELQQGLSQAKRDVQEQMAVLMQS

SEQ ID NO: 6625 - protein, 13 aa, Artificial
  helical interface sequence
SEEEIREAFRVFD

SEQ ID NO: 6626 - protein, 21 aa, Artificial
  helical interface sequence
RDEIDQLQEEMALTLQSYIKG

SEQ ID NO: 6627 - protein, 11 aa, Artificial
  helical interface sequence
LLALAQALERL

SEQ ID NO: 6628 - protein, 12 aa, Artificial
  helical interface sequence
LTSAEAVRDLIE

SEQ ID NO: 6629 - protein, 20 aa, Artificial
  helical interface sequence
RTIESILEPVAQQISHLVIM

SEQ ID NO: 6630 - protein, 17 aa, Artificial
  helical interface sequence
LLQGRLFSYTDTQISRL

SEQ ID NO: 6631 - protein, 10 aa, Artificial
  helical interface sequence
YSHPRLFWLS

SEQ ID NO: 6632 - protein, 17 aa, Artificial
  helical interface sequence
PFEQRHIVDGFSFELSK

SEQ ID NO: 6633 - protein, 6 aa, Artificial
  helical interface sequence
VHIGLA

SEQ ID NO: 6634 - protein, 8 aa, Artificial
  helical interface sequence
IEDRQKLD

SEQ ID NO: 6635 - protein, 15 aa, Artificial
  helical interface sequence
EEQIAEFKEAFSLFD

SEQ ID NO: 6636 - protein, 7 aa, Artificial
  helical interface sequence
GQIDYAL

SEQ ID NO: 6637 - protein, 7 aa, Artificial
  helical interface sequence
GQIDYAL

SEQ ID NO: 6638 - protein, 8 aa, Artificial
  helical interface sequence
FIDYLKYT

SEQ ID NO: 6639 - protein, 19 aa, Artificial
  helical interface sequence
PEAHVSLDKFLSGVALALA

SEQ ID NO: 6640 - protein, 18 aa, Artificial
  helical interface sequence
DYYQELQRDISEMFLQIY

SEQ ID NO: 6641 - protein, 9 aa, Artificial
  helical interface sequence
LERFMALQL

SEQ ID NO: 6642 - protein, 23 aa, Artificial
  helical interface sequence
FAEALRIGSEVYHNLKSLTKKRY

SEQ ID NO: 6643 - protein, 12 aa, Artificial
  helical interface sequence
VAAHGYFGRLIF

SEQ ID NO: 6644 - protein, 5 aa, Artificial
  helical interface sequence
AQLGS

SEQ ID NO: 6645 - protein, 35 aa, Artificial; identical to SEQ ID NO: 716
  helical interface sequence

SEQ ID NO: 6646 - protein, 12 aa, Artificial
  helical interface sequence
SALQDLLRTLKS

SEQ ID NO: 6647 - protein, 15 aa, Artificial
  helical interface sequence
HEDIHTYLREMEVKC

SEQ ID NO: 6648 - protein, 7 aa, Artificial
  helical interface sequence
IITTVLQ

SEQ ID NO: 6649 - protein, 9 aa, Artificial
  helical interface sequence
AEERRRKQN

SEQ ID NO: 6650 - protein, 9 aa, Artificial
  helical interface sequence
AEERRRKQN

SEQ ID NO: 6651 - protein, 10 aa, Artificial
  helical interface sequence
PNYRRRLVRW

SEQ ID NO: 6652 - protein, 9 aa, Artificial
  helical interface sequence
AEERRRKQN

SEQ ID NO: 6653 - protein, 11 aa, Artificial
  helical interface sequence
IQAALELIFAG

SEQ ID NO: 6654 - protein, 8 aa, Artificial
  helical interface sequence
PRQVLAEF

SEQ ID NO: 6655 - protein, 8 aa, Artificial
  helical interface sequence
PRQVLAEF

SEQ ID NO: 6656 - protein, 5 aa, Artificial
  helical interface sequence
EWYRS

SEQ ID NO: 6657 - protein, 16 aa, Artificial
  helical interface sequence
YYGRWLLTAARILVDK

SEQ ID NO: 6658 - protein, 26 aa, Artificial
  helical interface sequence
PLLDGLVLGLVFATLGGLFYAAYQQY

SEQ ID NO: 6659 - protein, 10 aa, Artificial
  helical interface sequence
PAARKLAREL

SEQ ID NO: 6660 - protein, 10 aa, Artificial
  helical interface sequence
PAARKLAREL

SEQ ID NO: 6661 - protein, 12 aa, Artificial
  helical interface sequence
LKPLEEVLNLAQ

SEQ ID NO: 6662 - protein, 26 aa, Artificial
  helical interface sequence
SSSTKKTQLQLEHLLLDLQMILNGIN

SEQ ID NO: 6663 - protein, 29 aa, Artificial
  helical interface sequence
DGLNQLYNLVAQDYALTDTIEALSRMLHR

SEQ ID NO: 6664 - protein, 14 aa, Artificial
  helical interface sequence
QSESIATNLIEMAS

SEQ ID NO: 6665 - protein, 24 aa, Artificial
  helical interface sequence
YNAELLVLMENERTLDFHDSNVKN

SEQ ID NO: 6666 - protein, 32 aa, Artificial; identical to SEQ ID NO: 6008
  helical interface sequence

SEQ ID NO: 6667 - protein, 12 aa, Artificial
  helical interface sequence
YGWGIAKELSKR

SEQ ID NO: 6668 - protein, 24 aa, Artificial
  helical interface sequence
PERRKPREEGLRHCLQIGVEALKA

SEQ ID NO: 6669 - protein, 6 aa, Artificial
  helical interface sequence
YDILTT

SEQ ID NO: 6670 - protein, 19 aa, Artificial
  helical interface sequence
KDTHIRELEDYIDNLLVRV

SEQ ID NO: 6671 - protein, 5 aa, Artificial
  helical interface sequence
FEKKS

SEQ ID NO: 6672 - protein, 16 aa, Artificial
  helical interface sequence
AEEAVRLARLGRLLTG

SEQ ID NO: 6673 - protein, 16 aa, Artificial
  helical interface sequence
AEEAVRLARLGRLLTG

SEQ ID NO: 6674 - protein, 6 aa, Artificial
  helical interface sequence
PALVFN

SEQ ID NO: 6675 - protein, 12 aa, Artificial
  helical interface sequence
EDTFKQIYAQFF

SEQ ID NO: 6676 - protein, 12 aa, Artificial
  helical interface sequence
EDTFKQIYAQFF

SEQ ID NO: 6677 - protein, 9 aa, Artificial
  helical interface sequence
WRVRYMVAD

SEQ ID NO: 6678 - protein, 10 aa, Artificial
  helical interface sequence
YEELKHLLSR

SEQ ID NO: 6679 - protein, 30 aa, Artificial; identical to SEQ ID NO: 1386
  helical interface sequence

SEQ ID NO: 6680 - protein, 9 aa, Artificial
  helical interface sequence
RPDAEYWNS

SEQ ID NO: 6681 - protein, 19 aa, Artificial
  helical interface sequence
KDQLHPLLAELLISINRVT

SEQ ID NO: 6682 - protein, 18 aa, Artificial
  helical interface sequence
DSVKQSAALCLLRLYRTS

SEQ ID NO: 6683 - protein, 12 aa, Artificial
  helical interface sequence
PLGPPAAEYWNS

SEQ ID NO: 6684 - protein, 12 aa, Artificial
  helical interface sequence
AIYIYTVLKQVH

SEQ ID NO: 6685 - protein, 27 aa, Artificial
  helical interface sequence
IYEETRGVLKVFLENVIRDAVTYTEHA

SEQ ID NO: 6686 - protein, 11 aa, Artificial
  helical interface sequence
AKALKQHLQRY

SEQ ID NO: 6687 - protein, 9 aa, Artificial
  helical interface sequence
AYSYIRDAW

SEQ ID NO: 6688 - protein, 9 aa, Artificial
  helical interface sequence
DRLRPLSYP

SEQ ID NO: 6689 - protein, 13 aa, Artificial
  helical interface sequence
AYQSFEQVVNELF

SEQ ID NO: 6690 - protein, 13 aa, Artificial
  helical interface sequence
WYIEALAQVFSER

SEQ ID NO: 6691 - protein, 6 aa, Artificial
  helical interface sequence
VHWYVG

SEQ ID NO: 6692 - protein, 11 aa, Artificial
  helical interface sequence
EEAIAEAKEIM

SEQ ID NO: 6693 - protein, 23 aa, Artificial
  helical interface sequence
VFQKKKLGCQLLGKYKQIIAVLA

SEQ ID NO: 6694 - protein, 10 aa, Artificial
  helical interface sequence
AAEVEFLAEK

SEQ ID NO: 6695 - protein, 6 aa, Artificial
  helical interface sequence
EALVHQ

SEQ ID NO: 6696 - protein, 9 aa, Artificial
  helical interface sequence
GMRVIDKKG

SEQ ID NO: 6697 - protein, 23 aa, Artificial
  helical interface sequence
VERLCFQIEQAHWFYEDFIRAQN

SEQ ID NO: 6698 - protein, 13 aa, Artificial
  helical interface sequence
QVAELIEKDMKKN

SEQ ID NO: 6699 - protein, 32 aa, Artificial
  helical interface sequence
QEWERKVDFLEENITALLEEAQIQQEKNMYEL

SEQ ID NO: 6700 - protein, 31 aa, Artificial
  helical interface sequence
QEWERKVDFLEENITALLEEAQIQQEKNMYE

SEQ ID NO: 6701 - protein, 13 aa, Artificial
  helical interface sequence
VAQIDALSQMVAE

SEQ ID NO: 6702 - protein, 27 aa, Artificial
  helical interface sequence
STEIQVAFGRFRQAAAGLSAATALTSA

SEQ ID NO: 6703 - protein, 17 aa, Artificial
  helical interface sequence
MELFRELVDQKMDAIKA

SEQ ID NO: 6704 - protein, 17 aa, Artificial
  helical interface sequence
TEHIPRLVMQAIRAALS

SEQ ID NO: 6705 - protein, 12 aa, Artificial
  helical interface sequence
GATLHFQQLAVG

SEQ ID NO: 6706 - protein, 7 aa, Artificial
  helical interface sequence
RKFLMEC

SEQ ID NO: 6707 - protein, 5 aa, Artificial
  helical interface sequence
LEELF

SEQ ID NO: 6708 - protein, 12 aa, Artificial
  helical interface sequence
AITAVINNYDVQ

SEQ ID NO: 6709 - protein, 12 aa, Artificial
  helical interface sequence
LATRRAFLKKKG

SEQ ID NO: 6710 - protein, 7 aa, Artificial
  helical interface sequence
FEGNLAL

SEQ ID NO: 6711 - protein, 19 aa, Artificial
  helical interface sequence
DEDFIQALDKMMLENLQQR

SEQ ID NO: 6712 - protein, 11 aa, Artificial
  helical interface sequence
VATWIFTIARN

SEQ ID NO: 6713 - protein, 5 aa, Artificial
  helical interface sequence
SLASV

SEQ ID NO: 6714 - protein, 18 aa, Artificial
  helical interface sequence
CDVLAKRMANLSQIYTQR

SEQ ID NO: 6715 - protein, 22 aa, Artificial
  helical interface sequence
AGDTVQFAEYIQANIQLYSIRE

SEQ ID NO: 6716 - protein, 22 aa, Artificial
  helical interface sequence
AADCQFWETWLGSQCRLHELRE

SEQ ID NO: 6717 - protein, 23 aa, Artificial
  helical interface sequence
AADTEAVTQLIGSNIELHSLYTS

SEQ ID NO: 6718 - protein, 22 aa, Artificial
  helical interface sequence
AGDTVQFAEYIQANIQLYSIRE

SEQ ID NO: 6719 - protein, 9 aa, Artificial
  helical interface sequence
EWYYQHVRA

SEQ ID NO: 6720 - protein, 22 aa, Artificial
  helical interface sequence
FSEFTGVWKYITDWQNVFRTYD

SEQ ID NO: 6721 - protein, 12 aa, Artificial
  helical interface sequence
TASVNCAKKIVS

SEQ ID NO: 6722 - protein, 27 aa, Artificial
  helical interface sequence
LAIVAYIGFLALFTGIAAGLLFGLRSA

SEQ ID NO: 6723 - protein, 68 aa, Artificial; identical to SEQ ID NO: 750
  helical interface sequence

SEQ ID NO: 6724 - protein, 19 aa, Artificial
  helical interface sequence
FYVIFYGCLAGIFIGTIQV

SEQ ID NO: 6725 - protein, 11 aa, Artificial
  helical interface sequence
IDNSVLKVVTN

SEQ ID NO: 6726 - protein, 15 aa, Artificial
  helical interface sequence
KEVAKKMVEYIIVNS

SEQ ID NO: 6727 - protein, 28 aa, Artificial
  helical interface sequence
KRWLHFFMLFVPVTGLWMSAIGVVGLAL

SEQ ID NO: 6728 - protein, 9 aa, Artificial
  helical interface sequence
EQVKSDIEN

SEQ ID NO: 6729 - protein, 27 aa, Artificial
  helical interface sequence
IYEETRGVLKVFLENVIRDAVTYTEHA

SEQ ID NO: 6730 - protein, 7 aa, Artificial
  helical interface sequence
EAEISHT

SEQ ID NO: 6731 - protein, 19 aa, Artificial
  helical interface sequence
GLQNIAVVKHNLGVLTKRS

SEQ ID NO: 6732 - protein, 22 aa, Artificial
  helical interface sequence
VGDAQVLVRYMKAELELYRLQR

SEQ ID NO: 6733 - protein, 15 aa, Artificial
  helical interface sequence
HDMFMDMAMLVESQG

SEQ ID NO: 6734 - protein, 9 aa, Artificial
  helical interface sequence
PVGPALGQH

SEQ ID NO: 6735 - protein, 21 aa, Artificial
  helical interface sequence
KEELRKLLQKLRESSLMLLDQ

SEQ ID NO: 6736 - protein, 9 aa, Artificial
  helical interface sequence
NHVKKFLER

SEQ ID NO: 6737 - protein, 13 aa, Artificial
  helical interface sequence
KAEVAAEFLNDRV

SEQ ID NO: 6738 - protein, 17 aa, Artificial
  helical interface sequence
SHVLSKVCMYFTYKVRY

SEQ ID NO: 6739 - protein, 9 aa, Artificial
  helical interface sequence
QLLRYLLDK

SEQ ID NO: 6740 - protein, 7 aa, Artificial
  helical interface sequence
PALGQQG

SEQ ID NO: 6741 - protein, 15 aa, Artificial
  helical interface sequence
TPLTAIKAYAETIYN

SEQ ID NO: 6742 - protein, 23 aa, Artificial
  helical interface sequence
TIISVALIYMVQVQMSKFSELGG

SEQ ID NO: 6743 - protein, 7 aa, Artificial
  helical interface sequence
EAEISHT

SEQ ID NO: 6744 - protein, 6 aa, Artificial
  helical interface sequence
PISEKY

SEQ ID NO: 6745 - protein, 13 aa, Artificial
  helical interface sequence
LEGRILAALTLKN

SEQ ID NO: 6746 - protein, 28 aa, Artificial
  helical interface sequence
EQCERARRLQAKMMTNLVMAKDRLQLLE

SEQ ID NO: 6747 - protein, 9 aa, Artificial
  helical interface sequence
RENYIHRIG

SEQ ID NO: 6748 - protein, 10 aa, Artificial
  helical interface sequence
RDWAESTLMT

SEQ ID NO: 6749 - protein, 17 aa, Artificial
  helical interface sequence
FCTPGIVMSMYTLLRNQ

SEQ ID NO: 6750 - protein, 17 aa, Artificial
  helical interface sequence
AQVPLGAGIALACKYNG

SEQ ID NO: 6751 - protein, 16 aa, Artificial
  helical interface sequence
NLVADLVQEVQQARDL

SEQ ID NO: 6752 - protein, 33 aa, Artificial; identical to SEQ ID NO: 2186
  helical interface sequence

SEQ ID NO: 6753 - protein, 16 aa, Artificial
  helical interface sequence
NLVADLVQEVQQARDL

SEQ ID NO: 6754 - protein, 11 aa, Artificial
  helical interface sequence
QEVKMVAWWIG

SEQ ID NO: 6755 - protein, 11 aa, Artificial
  helical interface sequence
QEVKMVAWWIG

SEQ ID NO: 6756 - protein, 30 aa, Artificial
  helical interface sequence
PLMFPRMLMKLVSLRTLSSVHSEQVFALRL

SEQ ID NO: 6757 - protein, 15 aa, Artificial
  helical interface sequence
ESVLNVIAADVTLVG

SEQ ID NO: 6758 - protein, 7 aa, Artificial
  helical interface sequence
VFYLHSR

SEQ ID NO: 6759 - protein, 8 aa, Artificial
  helical interface sequence
QDIIAILG

SEQ ID NO: 6760 - protein, 26 aa, Artificial
  helical interface sequence
ENLNKKMEDGFLDVWTYNAELLVLME

SEQ ID NO: 6761 - protein, 23 aa, Artificial
  helical interface sequence
LQEASDVLDDQIESFTKIIQNHY

SEQ ID NO: 6762 - protein, 16 aa, Artificial
  helical interface sequence
FTQILSTVEPKALEMV

SEQ ID NO: 6763 - protein, 10 aa, Artificial
  helical interface sequence
EELRAMIEEF

SEQ ID NO: 6764 - protein, 22 aa, Artificial
  helical interface sequence
EEDEKRFLVTVIKDLLGLCEQK

SEQ ID NO: 6765 - protein, 21 aa, Artificial
  helical interface sequence
PSRLQAILGDVCHIREQLMSV

SEQ ID NO: 6766 - protein, 15 aa, Artificial
  helical interface sequence
LLALAQALERLSLLW

SEQ ID NO: 6767 - protein, 9 aa, Artificial
  helical interface sequence
LDELMASLS

SEQ ID NO: 6768 - protein, 5 aa, Artificial
  helical interface sequence
EIIQN

SEQ ID NO: 6769 - protein, 23 aa, Artificial
  helical interface sequence
GTESNNLVIHSVVKHFHANQTSG

SEQ ID NO: 6770 - protein, 14 aa, Artificial
  helical interface sequence
EKSWFRETELYNTV

SEQ ID NO: 6771 - protein, 12 aa, Artificial
  helical interface sequence
SHEVVAWIKKIL

SEQ ID NO: 6772 - protein, 11 aa, Artificial
  helical interface sequence
HTLGNLIAGTL

SEQ ID NO: 6773 - protein, 23 aa, Artificial
  helical interface sequence
PQVCAKLFGNIQKVVNFWLLHNG

SEQ ID NO: 6774 - protein, 13 aa, Artificial
  helical interface sequence
KDLKNTMQYLTNF

SEQ ID NO: 6775 - protein, 6 aa, Artificial
  helical interface sequence
KMTRIL

SEQ ID NO: 6776 - protein, 21 aa, Artificial
  helical interface sequence
QAAMQMLKETINEEAAEWDRL

SEQ ID NO: 6777 - protein, 10 aa, Artificial
  helical interface sequence
VHAYLAEFDD

SEQ ID NO: 6778 - protein, 36 aa, Artificial; identical to SEQ ID NO: 312
  helical interface sequence

SEQ ID NO: 6779 - protein, 31 aa, Artificial; identical to SEQ ID NO: 1463
  helical interface sequence

SEQ ID NO: 6780 - protein, 9 aa, Artificial
  helical interface sequence
WWKLYSKVK

SEQ ID NO: 6781 - protein, 15 aa, Artificial
  helical interface sequence
AEETRRMLHRAFDTL

SEQ ID NO: 6782 - protein, 11 aa, Artificial
  helical interface sequence
DDLLQECISSA

SEQ ID NO: 6783 - protein, 11 aa, Artificial
  helical interface sequence
VGRVHRLLRKG

SEQ ID NO: 6784 - protein, 13 aa, Artificial
  helical interface sequence
QLQTELLAALLES

SEQ ID NO: 6785 - protein, 16 aa, Artificial
  helical interface sequence
VEDAGGETLGRLLVVY

SEQ ID NO: 6786 - protein, 15 aa, Artificial
  helical interface sequence
INSAARNIQHLLYGK

SEQ ID NO: 6787 - protein, 18 aa, Artificial
  helical interface sequence
QDLDEARAMEAKRKAEEH

SEQ ID NO: 6788 - protein, 10 aa, Artificial
  helical interface sequence
PEMAAVILKA

SEQ ID NO: 6789 - protein, 10 aa, Artificial
  helical interface sequence
PLWKGMKRVF

SEQ ID NO: 6790 - protein, 11 aa, Artificial
  helical interface sequence
PEMAAVILKAL

SEQ ID NO: 6791 - protein, 7 aa, Artificial
  helical interface sequence
EYEALTV

SEQ ID NO: 6792 - protein, 14 aa, Artificial
  helical interface sequence
YQVEYAFKATNQTN

SEQ ID NO: 6793 - protein, 11 aa, Artificial
  helical interface sequence
EAELQDMINEV

SEQ ID NO: 6794 - protein, 10 aa, Artificial
  helical interface sequence
EQTTVWLLTN

SEQ ID NO: 6795 - protein, 14 aa, Artificial
  helical interface sequence
VSEAAEIMYNRAQI

SEQ ID NO: 6796 - protein, 22 aa, Artificial
  helical interface sequence
AEEKHSRELEKKLKEDAEKDAR

SEQ ID NO: 6797 - protein, 14 aa, Artificial
  helical interface sequence
QAPLQRRILEIGKK

SEQ ID NO: 6798 - protein, 12 aa, Artificial
  helical interface sequence
AATGDFAYAAKA

SEQ ID NO: 6799 - protein, 13 aa, Artificial
  helical interface sequence
LDLDSRIELEMRT

SEQ ID NO: 6800 - protein, 13 aa, Artificial
  helical interface sequence
NAQFDALSNLVKE

SEQ ID NO: 6801 - protein, 14 aa, Artificial
  helical interface sequence
TLIMQLLRDNLTLW

SEQ ID NO: 6802 - protein, 9 aa, Artificial
  helical interface sequence
QKLKSRVEN

SEQ ID NO: 6803 - protein, 11 aa, Artificial
  helical interface sequence
LNQLKEVFSGI

SEQ ID NO: 6804 - protein, 11 aa, Artificial
  helical interface sequence
EEIREAFRVFD

SEQ ID NO: 6805 - protein, 14 aa, Artificial
  helical interface sequence
AKNYGRAVYECLRG

SEQ ID NO: 6806 - protein, 14 aa, Artificial
  helical interface sequence
DEQIAAQVDYIVAN

SEQ ID NO: 6807 - protein, 6 aa, Artificial
  helical interface sequence
WTDGLT

SEQ ID NO: 6808 - protein, 14 aa, Artificial
  helical interface sequence
AKNYGRAVYECLRG

SEQ ID NO: 6809 - protein, 6 aa, Artificial
  helical interface sequence
WTDGLT

SEQ ID NO: 6810 - protein, 6 aa, Artificial
  helical interface sequence
WTDGLT

SEQ ID NO: 6811 - protein, 6 aa, Artificial
  helical interface sequence
WTDGLT

SEQ ID NO: 6812 - protein, 6 aa, Artificial
  helical interface sequence
WTDGLT

SEQ ID NO: 6813 - protein, 22 aa, Artificial
  helical interface sequence
HGDCLTLTKIIEARLKMYKHSN

SEQ ID NO: 6814 - protein, 14 aa, Artificial
  helical interface sequence
YQVEYAFKAINQGG

SEQ ID NO: 6815 - protein, 19 aa, Artificial
  helical interface sequence
LDRAMRLVKDVFISAAERD

SEQ ID NO: 6816 - protein, 11 aa, Artificial
  helical interface sequence
LRLVVSIAKKY

SEQ ID NO: 6817 - protein, 9 aa, Artificial
  helical interface sequence
RPDAEYWNS

SEQ ID NO: 6818 - protein, 7 aa, Artificial
  helical interface sequence
KHFLTYL

SEQ ID NO: 6819 - protein, 11 aa, Artificial
  helical interface sequence
SGQKRFERYSQ

SEQ ID NO: 6820 - protein, 22 aa, Artificial
  helical interface sequence
AGDTVQFAEYIQANIQLYSIRE

SEQ ID NO: 6821 - protein, 23 aa, Artificial
  helical interface sequence
IPDARNAALRAKAEAAEFRYKYG

SEQ ID NO: 6822 - protein, 22 aa, Artificial
  helical interface sequence
ATDVTTLNEMFRYKTNLYKLKE

SEQ ID NO: 6823 - protein, 13 aa, Artificial
  helical interface sequence
EEIVMHIPELADE

SEQ ID NO: 6824 - protein, 9 aa, Artificial
  helical interface sequence
VEKIRYALG

SEQ ID NO: 6825 - protein, 21 aa, Artificial
  helical interface sequence
EDLWPQLYEAASTTICKALIQ

SEQ ID NO: 6826 - protein, 9 aa, Artificial
  helical interface sequence
KTTFVKRHL

SEQ ID NO: 6827 - protein, 47 aa, Artificial; identical to SEQ ID NO: 146
  helical interface sequence

SEQ ID NO: 6828 - protein, 11 aa, Artificial
  helical interface sequence
TVALREIRRYQ

SEQ ID NO: 6829 - protein, 8 aa, Artificial
  helical interface sequence
QYANNLAG

SEQ ID NO: 6830 - protein, 21 aa, Artificial
  helical interface sequence
RWAIWMAVLVTLTGGIGILLS

SEQ ID NO: 6831 - protein, 8 aa, Artificial
  helical interface sequence
VGCGQYSR

SEQ ID NO: 6832 - protein, 7 aa, Artificial
  helical interface sequence
ITTFLNM

SEQ ID NO: 6833 - protein, 5 aa, Artificial
  helical interface sequence
ADGFI

SEQ ID NO: 6834 - protein, 20 aa, Artificial
  helical interface sequence
VNVFLRTDAALGTVLMEIRN

SEQ ID NO: 6835 - protein, 5 aa, Artificial
  helical interface sequence
DDFSN

SEQ ID NO: 6836 - protein, 8 aa, Artificial
  helical interface sequence
ARRTRTIG

SEQ ID NO: 6837 - protein, 11 aa, Artificial
  helical interface sequence
PEMAAVILKAL

SEQ ID NO: 6838 - protein, 13 aa, Artificial
  helical interface sequence
KSARLAVEGLWQE

SEQ ID NO: 6839 - protein, 12 aa, Artificial
  helical interface sequence
DEEVDEMIREAD

SEQ ID NO: 6840 - protein, 10 aa, Artificial
  helical interface sequence
RKTCAAQLVS

SEQ ID NO: 6841 - protein, 9 aa, Artificial
  helical interface sequence
LIHFIREQQ

SEQ ID NO: 6842 - protein, 10 aa, Artificial
  helical interface sequence
LIHFIREQQN

SEQ ID NO: 6843 - protein, 11 aa, Artificial
  helical interface sequence
AWRLWKVGEQL

SEQ ID NO: 6844 - protein, 13 aa, Artificial
  helical interface sequence
PEGFEQASAIMGS

SEQ ID NO: 6845 - protein, 27 aa, Artificial
  helical interface sequence
KRAHHNALERKRRDHIKDSFHSLRDSV

SEQ ID NO: 6846 - protein, 11 aa, Artificial
  helical interface sequence
IEDQISLLKGA

SEQ ID NO: 6847 - protein, 5 aa, Artificial
  helical interface sequence
PGTRA

SEQ ID NO: 6848 - protein, 20 aa, Artificial
  helical interface sequence
DSEVQLEMITAWKKFVEEKK

SEQ ID NO: 6849 - protein, 14 aa, Artificial
  helical interface sequence
ATELMNILNKVVTR

SEQ ID NO: 6850 - protein, 7 aa, Artificial
  helical interface sequence
YSLARIV

SEQ ID NO: 6851 - protein, 11 aa, Artificial
  helical interface sequence
STGISVASYLN

SEQ ID NO: 6852 - protein, 25 aa, Artificial
  helical interface sequence
PKEQAIGLSVTFLSFLLPAGWVLYH

SEQ ID NO: 6853 - protein, 17 aa, Artificial
  helical interface sequence
NFKILSHNILVTLAIHF

SEQ ID NO: 6854 - protein, 16 aa, Artificial
  helical interface sequence
ADVVGAEALGRMLTAY

SEQ ID NO: 6855 - protein, 12 aa, Artificial
  helical interface sequence
LISALVRAHVDS

SEQ ID NO: 6856 - protein, 13 aa, Artificial
  helical interface sequence
NTNLAVVFGPNLL

SEQ ID NO: 6857 - protein, 10 aa, Artificial
  helical interface sequence
RELDELMASL

SEQ ID NO: 6858 - protein, 15 aa, Artificial
  helical interface sequence
ILSHLDWVNNFGYQY

SEQ ID NO: 6859 - protein, 14 aa, Artificial
  helical interface sequence
EAQAQEMYRYLAIA

SEQ ID NO: 6860 - protein, 30 aa, Artificial
  helical interface sequence
SMDLAIFAVHVSGASSILGAINIITTFLNM

SEQ ID NO: 6861 - protein, 6 aa, Artificial
  helical interface sequence
PWTQRF

SEQ ID NO: 6862 - protein, 7 aa, Artificial
  helical interface sequence
LLMLTLG

SEQ ID NO: 6863 - protein, 7 aa, Artificial
  helical interface sequence
VKKFLER

SEQ ID NO: 6864 - protein, 28 aa, Artificial
  helical interface sequence
PEFLEQKRAEVDTVCRHNYEIFDNFLVP

SEQ ID NO: 6865 - protein, 9 aa, Artificial
  helical interface sequence
RPDAENWNS

SEQ ID NO: 6866 - protein, 9 aa, Artificial
  helical interface sequence
QAAYLLRKH

SEQ ID NO: 6867 - protein, 15 aa, Artificial
  helical interface sequence
VERATQLMLAVHYQG

SEQ ID NO: 6868 - protein, 23 aa, Artificial
  helical interface sequence
QKSTQNAIDGITNKVNSVIEKMN

SEQ ID NO: 6869 - protein, 23 aa, Artificial
  helical interface sequence
PAEVEALREKVYASLEAYCKHKY

SEQ ID NO: 6870 - protein, 17 aa, Artificial
  helical interface sequence
GIGLFIAAGVSQTIFVG

SEQ ID NO: 6871 - protein, 18 aa, Artificial
  helical interface sequence
VEILVRRLSDIKQGYTQH

SEQ ID NO: 6872 - protein, 22 aa, Artificial
  helical interface sequence
AADGDALVKRFKNSVKWYHFDH

SEQ ID NO: 6873 - protein, 15 aa, Artificial
  helical interface sequence
INSAARNIQHLLYGK

SEQ ID NO: 6874 - protein, 20 aa, Artificial
  helical interface sequence
DEQKRALSAGLLRVISEATG

SEQ ID NO: 6875 - protein, 24 aa, Artificial
  helical interface sequence
RTSLYLGLLLILVLALLFSSYFFN

SEQ ID NO: 6876 - protein, 27 aa, Artificial
  helical interface sequence
TVRWVAVHTLAVPTIFFLGAIAAMQFI

SEQ ID NO: 6877 - protein, 24 aa, Artificial
  helical interface sequence
KDILERKRAAVDRVCRHNYQLELR

SEQ ID NO: 6878 - protein, 21 aa, Artificial
  helical interface sequence
PQFALTNIAVLKHNLNSLIKR

SEQ ID NO: 6879 - protein, 37 aa, Artificial; identical to SEQ ID NO: 288
  helical interface sequence

SEQ ID NO: 6880 - protein, 5 aa, Artificial
  helical interface sequence
MASLF

SEQ ID NO: 6881 - protein, 22 aa, Artificial
  helical interface sequence
PMIVEGQIRGGIAQAIGQTLLE

SEQ ID NO: 6882 - protein, 14 aa, Artificial
  helical interface sequence
WTAVANGITYAADQ

SEQ ID NO: 6883 - protein, 6 aa, Artificial
  helical interface sequence
HTARLV

SEQ ID NO: 6884 - protein, 19 aa, Artificial
  helical interface sequence
YKSTQSAIDQITGKLNRLI

SEQ ID NO: 6885 - protein, 14 aa, Artificial
  helical interface sequence
ESFARVTVAAFVAQ

SEQ ID NO: 6886 - protein, 15 aa, Artificial
  helical interface sequence
QIVATDVCQFLELCQ

SEQ ID NO: 6887 - protein, 11 aa, Artificial
  helical interface sequence
PWGWVSQIASG

SEQ ID NO: 6888 - protein, 11 aa, Artificial
  helical interface sequence
PWGWVSQIASG

SEQ ID NO: 6889 - protein, 13 aa, Artificial
  helical interface sequence
FITFLGALKSFLK

SEQ ID NO: 6890 - protein, 14 aa, Artificial
  helical interface sequence
FITFLGALKSFLKG

SEQ ID NO: 6891 - protein, 17 aa, Artificial
  helical interface sequence
YGRLIGLISFGGFVAAK

SEQ ID NO: 6892 - protein, 15 aa, Artificial
  helical interface sequence
EAAIVGAALGMAAHG

SEQ ID NO: 6893 - protein, 12 aa, Artificial
  helical interface sequence
ALKRIHKELNDL

SEQ ID NO: 6894 - protein, 6 aa, Artificial
  helical interface sequence
WTDGLT

SEQ ID NO: 6895 - protein, 6 aa, Artificial
  helical interface sequence
WTDGLT

SEQ ID NO: 6896 - protein, 6 aa, Artificial
  helical interface sequence
WTDGLT

SEQ ID NO: 6897 - protein, 6 aa, Artificial
  helical interface sequence
WTDGLT

SEQ ID NO: 6898 - protein, 6 aa, Artificial
  helical interface sequence
WTDGLT

SEQ ID NO: 6899 - protein, 25 aa, Artificial
  helical interface sequence
LLARRLRFHIVGAFMVSLGFATFYK

SEQ ID NO: 6900 - protein, 8 aa, Artificial
  helical interface sequence
PIQGFSAK

SEQ ID NO: 6901 - protein, 18 aa, Artificial
  helical interface sequence
SHVLSKVCMYFTYKVRYT

SEQ ID NO: 6902 - protein, 13 aa, Artificial
  helical interface sequence
VEDLFSSLKHIQH

SEQ ID NO: 6903 - protein, 9 aa, Artificial
  helical interface sequence
AYSYIRDAW

SEQ ID NO: 6904 - protein, 18 aa, Artificial
  helical interface sequence
RDAIKRIAYEFVEMKAKD

SEQ ID NO: 6905 - protein, 13 aa, Artificial
  helical interface sequence
EIKRQEVINELFY

SEQ ID NO: 6906 - protein, 38 aa, Artificial
  helical interface sequence
QREIDRQEVINELFVTEASHLRTLRVLDLIFYQRMKKE

SEQ ID NO: 6907 - protein, 8 aa, Artificial
  helical interface sequence
RDQYMRTG

SEQ ID NO: 6908 - protein, 6 aa, Artificial
  helical interface sequence
LTEIKK

SEQ ID NO: 6909 - protein, 10 aa, Artificial
  helical interface sequence
AEDAAFIMKN

SEQ ID NO: 6910 - protein, 17 aa, Artificial
  helical interface sequence
RELLITDLLLRIEHYLQ

SEQ ID NO: 6911 - protein, 23 aa, Artificial
  helical interface sequence
FTHLVWLVAYAWAIYWGASYFTE

SEQ ID NO: 6912 - protein, 23 aa, Artificial
  helical interface sequence
TQQVENLREKVYAILEEYCRQTY

SEQ ID NO: 6913 - protein, 28 aa, Artificial
  helical interface sequence
RSCRNSMRQQIQMEVGASLQYLAMGAHF

SEQ ID NO: 6914 - protein, 28 aa, Artificial
  helical interface sequence
RSCRNSMRQQIQMEVGASLQYLAMGAHF

SEQ ID NO: 6915 - protein, 28 aa, Artificial
  helical interface sequence
RSCRNSMRQQIQMEVGASLQYLAMGAHF

SEQ ID NO: 6916 - protein, 28 aa, Artificial
  helical interface sequence
RSCRNSMRQQIQMEVGASLQYLAMGAHF

SEQ ID NO: 6917 - protein, 28 aa, Artificial
  helical interface sequence
RSCRNSMRQQIQMEVGASLQYLAMGAHF

SEQ ID NO: 6918 - protein, 35 aa, Artificial; identical to SEQ ID NO: 5251
  helical interface sequence

SEQ ID NO: 6919 - protein, 28 aa, Artificial
  helical interface sequence
RSCRNSMRQQIQMEVGASLQYLAMGAHF

SEQ ID NO: 6920 - protein, 28 aa, Artificial
  helical interface sequence
RSCRNSMRQQIQMEVGASLQYLAMGAHF

SEQ ID NO: 6921 - protein, 28 aa, Artificial
  helical interface sequence
RSCRNSMRQQIQMEVGASLQYLAMGAHF

SEQ ID NO: 6922 - protein, 28 aa, Artificial
  helical interface sequence
RSCRNSMRQQIQMEVGASLQYLAMGAHF

SEQ ID NO: 6923 - protein, 12 aa, Artificial
  helical interface sequence
QTFAYGVLDSNY

SEQ ID NO: 6924 - protein, 12 aa, Artificial
  helical interface sequence
PAVHASLDKFLA

SEQ ID NO: 6925 - protein, 41 aa, Artificial; identical to SEQ ID NO: 2156
  helical interface sequence

SEQ ID NO: 6926 - protein, 5 aa, Artificial
  helical interface sequence
SRFEN

SEQ ID NO: 6927 - protein, 5 aa, Artificial
  helical interface sequence
EEFGR

SEQ ID NO: 6928 - protein, 16 aa, Artificial
  helical interface sequence
TGHSLLHTLYGRSLRY

SEQ ID NO: 6929 - protein, 17 aa, Artificial
  helical interface sequence
QKEIDRLNEVAKNLNES

SEQ ID NO: 6930 - protein, 9 aa, Artificial
  helical interface sequence
EKELFESYI

SEQ ID NO: 6931 - protein, 12 aa, Artificial
  helical interface sequence
AANAKQLYDFIH

SEQ ID NO: 6932 - protein, 14 aa, Artificial
  helical interface sequence
STEISELIKQRIAQ

SEQ ID NO: 6933 - protein, 6 aa, Artificial
  helical interface sequence
PWTQRY

SEQ ID NO: 6934 - protein, 7 aa, Artificial
  helical interface sequence
EAEISHT

SEQ ID NO: 6935 - protein, 14 aa, Artificial
  helical interface sequence
GVQVKAFIDSLRDD

SEQ ID NO: 6936 - protein, 7 aa, Artificial
  helical interface sequence
PVALYLG

SEQ ID NO: 6937 - protein, 35 aa, Artificial; identical to SEQ ID NO: 1057
  helical interface sequence

SEQ ID NO: 6938 - protein, 13 aa, Artificial
  helical interface sequence
QKEIDRLNEVAKN

SEQ ID NO: 6939 - protein, 8 aa, Artificial
  helical interface sequence
DNFINTMF

SEQ ID NO: 6940 - protein, 17 aa, Artificial
  helical interface sequence
NAIELARVVDRSLRDSK

SEQ ID NO: 6941 - protein, 25 aa, Artificial
  helical interface sequence
NRRMAACLRDMEIVLRYVSYAEIAG

SEQ ID NO: 6942 - protein, 10 aa, Artificial
  helical interface sequence
REVLLGIEEE

SEQ ID NO: 6943 - protein, 17 aa, Artificial
  helical interface sequence
SQAHRNTGNNAARLVKG

SEQ ID NO: 6944 - protein, 6 aa, Artificial
  helical interface sequence
VNSIDY

SEQ ID NO: 6945 - protein, 11 aa, Artificial
  helical interface sequence
REEVEHIANLA

SEQ ID NO: 6946 - protein, 9 aa, Artificial
  helical interface sequence
AEERRRKQN

SEQ ID NO: 6947 - protein, 13 aa, Artificial
  helical interface sequence
EKAMELIRELHRA

SEQ ID NO: 6948 - protein, 18 aa, Artificial
  helical interface sequence
PAELIERLEQAWMNEKFA

SEQ ID NO: 6949 - protein, 6 aa, Artificial
  helical interface sequence
FITTIG

SEQ ID NO: 6950 - protein, 29 aa, Artificial
  helical interface sequence
SKDKEVIETLSEIYSIVITLDHVEKAYLK

SEQ ID NO: 6951 - protein, 21 aa, Artificial
  helical interface sequence
GELAKHAVSEGTKAVTKYTSA

SEQ ID NO: 6952 - protein, 15 aa, Artificial
  helical interface sequence
TEDLKNRRYQRLMSY

SEQ ID NO: 6953 - protein, 8 aa, Artificial
  helical interface sequence
IEDRQKLD

SEQ ID NO: 6954 - protein, 14 aa, Artificial
  helical interface sequence
LKDYEDQQKQLEQV

SEQ ID NO: 6955 - protein, 32 aa, Artificial; identical to SEQ ID NO: 6008
  helical interface sequence

SEQ ID NO: 6956 - protein, 18 aa, Artificial
  helical interface sequence
HDREAFSQAIWRATFAQV

SEQ ID NO: 6957 - protein, 19 aa, Artificial
  helical interface sequence
PAFIAHADRVLGGLDIAIS

SEQ ID NO: 6958 - protein, 15 aa, Artificial
  helical interface sequence
MDKINNRFNYLFEVN

SEQ ID NO: 6959 - protein, 18 aa, Artificial
  helical interface sequence
AEWEAKILELAGFLDSYI

SEQ ID NO: 6960 - protein, 16 aa, Artificial
  helical interface sequence
LTELLQGYTVEVLRQQ

SEQ ID NO: 6961 - protein, 9 aa, Artificial
  helical interface sequence
IDTILSSKL

SEQ ID NO: 6962 - protein, 5 aa, Artificial
  helical interface sequence
YNVAL

SEQ ID NO: 6963 - protein, 11 aa, Artificial
  helical interface sequence
GFYDECLRKYG

SEQ ID NO: 6964 - protein, 10 aa, Artificial
  helical interface sequence
RPDAEYWNSQ

SEQ ID NO: 6965 - protein, 32 aa, Artificial
  helical interface sequence
KGRSYAYFMVGAMGLLSSAGAKSTVETFISSM

SEQ ID NO: 6966 - protein, 5 aa, Artificial
  helical interface sequence
DADRV

SEQ ID NO: 6967 - protein, 29 aa, Artificial
  helical interface sequence
ARYVNALKLFISGISPLEHAAFQGYSKVG

SEQ ID NO: 6968 - protein, 9 aa, Artificial
  helical interface sequence
FFFTKLKTA

SEQ ID NO: 6969 - protein, 5 aa, Artificial
  helical interface sequence
ERKYR

SEQ ID NO: 6970 - protein, 5 aa, Artificial
  helical interface sequence
ERKYR

SEQ ID NO: 6971 - protein, 6 aa, Artificial
  helical interface sequence
FLLSQT

SEQ ID NO: 6972 - protein, 21 aa, Artificial
  helical interface sequence
WGRIVTLISFGAFVAKHLKTI

SEQ ID NO: 6973 - protein, 11 aa, Artificial
  helical interface sequence
RLPALRSIGLK

SEQ ID NO: 6974 - protein, 23 aa, Artificial
  helical interface sequence
VQEVEMLREKIYGVLEEYTRTTH

SEQ ID NO: 6975 - protein, 11 aa, Artificial
  helical interface sequence
PKDIQLARRIR

SEQ ID NO: 6976 - protein, 22 aa, Artificial
  helical interface sequence
SHCWLRDMVIQLSLSLTTLLDK

SEQ ID NO: 6977 - protein, 16 aa, Artificial
  helical interface sequence
VQSQVVEAFIRWRQRF

SEQ ID NO: 6978 - protein, 5 aa, Artificial
  helical interface sequence
LRGFL

SEQ ID NO: 6979 - protein, 15 aa, Artificial
  helical interface sequence
QDEIDDLKEVFELFD

SEQ ID NO: 6980 - protein, 8 aa, Artificial
  helical interface sequence
PEEIRKTF

SEQ ID NO: 6981 - protein, 9 aa, Artificial
  helical interface sequence
PLLLKRRKK

SEQ ID NO: 6982 - protein, 34 aa, Artificial; identical to SEQ ID NO: 4372
  helical interface sequence

SEQ ID NO: 6983 - protein, 6 aa, Artificial
  helical interface sequence
PEFYQT

SEQ ID NO: 6984 - protein, 14 aa, Artificial
  helical interface sequence
NLEAQNLGNFIVKY

SEQ ID NO: 6985 - protein, 17 aa, Artificial
  helical interface sequence
RRSFMKANAVAAAAAAA

SEQ ID NO: 6986 - protein, 9 aa, Artificial
  helical interface sequence
KILHRLLQE

SEQ ID NO: 6987 - protein, 19 aa, Artificial
  helical interface sequence
YRYKALSYLLFNWIHPTYG

SEQ ID NO: 6988 - protein, 6 aa, Artificial
  helical interface sequence
ELALIY

SEQ ID NO: 6989 - protein, 19 aa, Artificial
  helical interface sequence
IPMAEKKLAQIGDEINEKW

SEQ ID NO: 6990 - protein, 29 aa, Artificial
  helical interface sequence
GFMLRYLHANGASLFFIAVYLHIFRGLYY

SEQ ID NO: 6991 - protein, 29 aa, Artificial
  helical interface sequence
GFMLRYLHANGASLFFIAVYLHIFRGLYY

SEQ ID NO: 6992 - protein, 29 aa, Artificial
  helical interface sequence
GFMLRYLHANGASLFFIAVYLHIFRGLYY

SEQ ID NO: 6993 - protein, 15 aa, Artificial
  helical interface sequence
GGTHLIQILNVMENA

SEQ ID NO: 6994 - protein, 16 aa, Artificial
  helical interface sequence
VADCGAEALARLLIVY

SEQ ID NO: 6995 - protein, 6 aa, Artificial
  helical interface sequence
AFLTSN

SEQ ID NO: 6996 - protein, 33 aa, Artificial
  helical interface sequence
QEWERKVDFLEENITALLEEAQIQQEKNMYELQ

SEQ ID NO: 6997 - protein, 27 aa, Artificial
  helical interface sequence
STEIQVAFGRFRQAAAGLSAATALTSA

SEQ ID NO: 6998 - protein, 12 aa, Artificial
  helical interface sequence
PLTDAVSTADSQ

SEQ ID NO: 6999 - protein, 15 aa, Artificial
  helical interface sequence
TEEQLLAVQAIRKYG

SEQ ID NO: 7000 - protein, 9 aa, Artificial
  helical interface sequence
LSRLLSYAG

SEQ ID NO: 7001 - protein, 11 aa, Artificial
  helical interface sequence
WGRVAMAIGKC

SEQ ID NO: 7002 - protein, 12 aa, Artificial
  helical interface sequence
GELVDTLQFVCG

SEQ ID NO: 7003 - protein, 21 aa, Artificial
  helical interface sequence
LGRALAWMAWCMHACRTLCCN

SEQ ID NO: 7004 - protein, 14 aa, Artificial
  helical interface sequence
RSTVAQLVKRLTDA

SEQ ID NO: 7005 - protein, 14 aa, Artificial
  helical interface sequence
FATIIERSKKFING

SEQ ID NO: 7006 - protein, 18 aa, Artificial
  helical interface sequence
PQALTEFRSYLDYVINAL

SEQ ID NO: 7007 - protein, 13 aa, Artificial
  helical interface sequence
TEMANKAAEAVLK

SEQ ID NO: 7008 - protein, 17 aa, Artificial
  helical interface sequence
PLAHVHLATEYAIRTTN

SEQ ID NO: 7009 - protein, 18 aa, Artificial
  helical interface sequence
NTLLIVQHANVVKAARDA

SEQ ID NO: 7010 - protein, 36 aa, Artificial
  helical interface sequence
EYDKRCCCLREIQQTEEKYTDTLGSIQQHFMKPLQR

SEQ ID NO: 7011 - protein, 11 aa, Artificial
  helical interface sequence
EMERDCLIGFG

SEQ ID NO: 7012 - protein, 15 aa, Artificial
  helical interface sequence
EEQIAEFKEAFSLFD

SEQ ID NO: 7013 - protein, 5 aa, Artificial
  helical interface sequence
FQASI

SEQ ID NO: 7014 - protein, 23 aa, Artificial
  helical interface sequence
RKARETLFAAGNYAYAHRKRRKR

SEQ ID NO: 7015 - protein, 5 aa, Artificial
  helical interface sequence
KYELD

SEQ ID NO: 7016 - protein, 43 aa, Artificial
  helical interface sequence
PQVQAMLGQLDTYQQQLQLVIQQKQKVQADLNEAKKALEEIET

SEQ ID NO: 7017 - protein, 11 aa, Artificial
  helical interface sequence
VQDAEDLLRFI

SEQ ID NO: 7018 - protein, 15 aa, Artificial
  helical interface sequence
VAEAYSSVQYIMNEV

SEQ ID NO: 7019 - protein, 10 aa, Artificial
  helical interface sequence
MSQIKRLLSE

SEQ ID NO: 7020 - protein, 7 aa, Artificial
  helical interface sequence
PWTQRHF

SEQ ID NO: 7021 - protein, 29 aa, Artificial
  helical interface sequence
SEYWDRETRSARDTAQIFRVNLRTLRGYY

SEQ ID NO: 7022 - protein, 25 aa, Artificial
  helical interface sequence
LSQERTARLNELQRALVMMDSDFRQ

SEQ ID NO: 7023 - protein, 9 aa, Artificial
  helical interface sequence
PVGPALGQH

SEQ ID NO: 7024 - protein, 9 aa, Artificial
  helical interface sequence
PVGPALGQH

SEQ ID NO: 7025 - protein, 8 aa, Artificial
  helical interface sequence
LPGLFDGG

SEQ ID NO: 7026 - protein, 14 aa, Artificial
  helical interface sequence
GVEKIKEVISKALE

SEQ ID NO: 7027 - protein, 18 aa, Artificial
  helical interface sequence
IDDLIHFTLKQWNRLTIS

SEQ ID NO: 7028 - protein, 14 aa, Artificial
  helical interface sequence
PEFIELIEKEIQRR

SEQ ID NO: 7029 - protein, 14 aa, Artificial
  helical interface sequence
TDIRAQRLATLESV

SEQ ID NO: 7030 - protein, 32 aa, Artificial
  helical interface sequence
LSTLKEFLEVIIDQSNHLENLLNELLDFSRLE

SEQ ID NO: 7031 - protein, 16 aa, Artificial
  helical interface sequence
DFDLHLLKVSEGTTIL

SEQ ID NO: 7032 - protein, 6 aa, Artificial
  helical interface sequence
AFNLFD

SEQ ID NO: 7033 - protein, 14 aa, Artificial
  helical interface sequence
GPLFNTDYDILKSN

SEQ ID NO: 7034 - protein, 20 aa, Artificial
  helical interface sequence
WKDKAAVEINLAVLHSFQLA

SEQ ID NO: 7035 - protein, 19 aa, Artificial
  helical interface sequence
PSSFENVKEKWVPEITHHC

SEQ ID NO: 7036 - protein, 6 aa, Artificial
  helical interface sequence
WFEELS

SEQ ID NO: 7037 - protein, 12 aa, Artificial
  helical interface sequence
VFAQRLRQSVQT

SEQ ID NO: 7038 - protein, 24 aa, Artificial
  helical interface sequence
NQHTIDVTDSEMNKLFERVRRQLR

SEQ ID NO: 7039 - protein, 33 aa, Artificial; identical to SEQ ID NO: 2186
  helical interface sequence

SEQ ID NO: 7040 - protein, 16 aa, Artificial
  helical interface sequence
NLVADLVQEVQQARDL

SEQ ID NO: 7041 - protein, 11 aa, Artificial
  helical interface sequence
PYVAAAHLLGA

SEQ ID NO: 7042 - protein, 15 aa, Artificial
  helical interface sequence
SDQVIEEMLDTAHYV

SEQ ID NO: 7043 - protein, 20 aa, Artificial
  helical interface sequence
PLQLTSQIEHSIRAHISLYY

SEQ ID NO: 7044 - protein, 16 aa, Artificial
  helical interface sequence
FTQILSTVEPKALEMV

SEQ ID NO: 7045 - protein, 21 aa, Artificial
  helical interface sequence
NFLRVIGKKLIAIRDRFLKRI

SEQ ID NO: 7046 - protein, 14 aa, Artificial
  helical interface sequence
IPQILTPILDKYTH

SEQ ID NO: 7047 - protein, 29 aa, Artificial
  helical interface sequence
IRYLQEIYNSNNQKIVNLKEKVAQLEAQC

SEQ ID NO: 7048 - protein, 22 aa, Artificial
  helical interface sequence
EEDEKRFLVTVIKDLLGLCEQK

SEQ ID NO: 7049 - protein, 17 aa, Artificial
  helical interface sequence
AQRDAVTLFCCLLRSRL

SEQ ID NO: 7050 - protein, 6 aa, Artificial
  helical interface sequence
PIEMYL

SEQ ID NO: 7051 - protein, 13 aa, Artificial
  helical interface sequence
IFEMYARTRDEGF

SEQ ID NO: 7052 - protein, 11 aa, Artificial
  helical interface sequence
REWVLKIAKLA

SEQ ID NO: 7053 - protein, 12 aa, Artificial
  helical interface sequence
RARLEAQIYRLT

SEQ ID NO: 7054 - protein, 13 aa, Artificial
  helical interface sequence
GEYRRRWKREVLG

SEQ ID NO: 7055 - protein, 6 aa, Artificial
  helical interface sequence
REETQQ

SEQ ID NO: 7056 - protein, 14 aa, Artificial
  helical interface sequence
WQMLEMLKPCVEDG

SEQ ID NO: 7057 - protein, 17 aa, Artificial
  helical interface sequence
PFTQNLGKFAVDEENKI

SEQ ID NO: 7058 - protein, 8 aa, Artificial
  helical interface sequence
ALHWATEH

SEQ ID NO: 7059 - protein, 23 aa, Artificial
  helical interface sequence
IVVGALLFERAFDQGADAIYEHI

SEQ ID NO: 7060 - protein, 7 aa, Artificial
  helical interface sequence
SEQLTSG

SEQ ID NO: 7061 - protein, 11 aa, Artificial
  helical interface sequence
AELRHVMTNLG

SEQ ID NO: 7062 - protein, 21 aa, Artificial
  helical interface sequence
PKEHAAAYKFFRLVAEALSSN

SEQ ID NO: 7063 - protein, 10 aa, Artificial
  helical interface sequence
SDLLGWWLCE

SEQ ID NO: 7064 - protein, 12 aa, Artificial
  helical interface sequence
AWPTKLEWERHK

SEQ ID NO: 7065 - protein, 13 aa, Artificial
  helical interface sequence
QDQRIGLSVIQRN

SEQ ID NO: 7066 - protein, 19 aa, Artificial
  helical interface sequence
KMLQGRLFAYPDTHRHRLG

SEQ ID NO: 7067 - protein, 14 aa, Artificial
  helical interface sequence
VSATILYYNDLLEY

SEQ ID NO: 7068 - protein, 14 aa, Artificial
  helical interface sequence
VSATILYYNDLLEY

SEQ ID NO: 7069 - protein, 12 aa, Artificial
  helical interface sequence
AAVADLSFAAKA

SEQ ID NO: 7070 - protein, 8 aa, Artificial
  helical interface sequence
VQLRRKLE

SEQ ID NO: 7071 - protein, 11 aa, Artificial
  helical interface sequence
TREHILLGRQV

SEQ ID NO: 7072 - protein, 12 aa, Artificial
  helical interface sequence
SIYVYKVLKQVH

SEQ ID NO: 7073 - protein, 16 aa, Artificial
  helical interface sequence
WYIQSLCQSLRERCPR

SEQ ID NO: 7074 - protein, 16 aa, Artificial
  helical interface sequence
VEDAGGETLGRLLVVY

SEQ ID NO: 7075 - protein, 17 aa, Artificial
  helical interface sequence
FCTPGMLMRAYRFLQEN

SEQ ID NO: 7076 - protein, 19 aa, Artificial
  helical interface sequence
CDVLAKRMANLSQIYTQRA

SEQ ID NO: 7077 - protein, 14 aa, Artificial
  helical interface sequence
QGTLFELILAANYL

SEQ ID NO: 7078 - protein, 23 aa, Artificial
  helical interface sequence
IPDARNAALRAKAEAAEFRYKYG

SEQ ID NO: 7079 - protein, 12 aa, Artificial
  helical interface sequence
SDQLFGMCESLY

SEQ ID NO: 7080 - protein, 12 aa, Artificial
  helical interface sequence
AFTKVVSQADTR

SEQ ID NO: 7081 - protein, 13 aa, Artificial
  helical interface sequence
TAQIDALSQMVAE

SEQ ID NO: 7082 - protein, 5 aa, Artificial
  helical interface sequence
SLENH

SEQ ID NO: 7083 - protein, 14 aa, Artificial
  helical interface sequence
DHEDMIGMFESWWH

SEQ ID NO: 7084 - protein, 6 aa, Artificial
  helical interface sequence
FWDAMT

SEQ ID NO: 7085 - protein, 10 aa, Artificial
  helical interface sequence
KKKLQDLVRE

SEQ ID NO: 7086 - protein, 16 aa, Artificial
  helical interface sequence
YDDIGPKALSRCLIVY

SEQ ID NO: 7087 - protein, 12 aa, Artificial
  helical interface sequence
ESLRKYKEALLG

SEQ ID NO: 7088 - protein, 21 aa, Artificial
  helical interface sequence
HKELSEHLMLVDLARNDLARI

SEQ ID NO: 7089 - protein, 11 aa, Artificial
  helical interface sequence
DEFIAHRLGLI

SEQ ID NO: 7090 - protein, 13 aa, Artificial
  helical interface sequence
WFVQALCSILEEH

SEQ ID NO: 7091 - protein, 12 aa, Artificial
  helical interface sequence
LVPLLKLARDYS

SEQ ID NO: 7092 - protein, 5 aa, Artificial
  helical interface sequence
DEQLK

SEQ ID NO: 7093 - protein, 16 aa, Artificial
  helical interface sequence
AEVDITGMTMLLQNLG

SEQ ID NO: 7094 - protein, 18 aa, Artificial
  helical interface sequence
TRVRVAALQNLVKIMSLY

SEQ ID NO: 7095 - protein, 15 aa, Artificial
  helical interface sequence
AEVDITGMTMLLQNL

SEQ ID NO: 7096 - protein, 12 aa, Artificial
  helical interface sequence
DEEVDEMIREAD

SEQ ID NO: 7097 - protein, 12 aa, Artificial
  helical interface sequence
FQVEYAQEAVKK

SEQ ID NO: 7098 - protein, 11 aa, Artificial
  helical interface sequence
VVEIILNLKEL

SEQ ID NO: 7099 - protein, 8 aa, Artificial
  helical interface sequence
SFAQAEAR

SEQ ID NO: 7100 - protein, 10 aa, Artificial
  helical interface sequence
ADAMMQALLG

SEQ ID NO: 7101 - protein, 10 aa, Artificial
  helical interface sequence
YQVEYAFKAT

SEQ ID NO: 7102 - protein, 23 aa, Artificial
  helical interface sequence
DAWGKQLEMLREVGQRLRLELAD

SEQ ID NO: 7103 - protein, 9 aa, Artificial
  helical interface sequence
YERVLAFAQ

SEQ ID NO: 7104 - protein, 27 aa, Artificial
  helical interface sequence
PVIVIINLITLAAALLHTKTWFELAPK

SEQ ID NO: 7105 - protein, 49 aa, Artificial
  helical interface sequence
LADARELVTDTRQFLADVPAHTSFTNAQLLKIMMAQDFQDLTGQVIKRM

SEQ ID NO: 7106 - protein, 16 aa, Artificial
  helical interface sequence
SLYTQLEMLVQGAERL

SEQ ID NO: 7107 - protein, 16 aa, Artificial
  helical interface sequence
SLYTQLEMLVQGAERL

SEQ ID NO: 7108 - protein, 15 aa, Artificial
  helical interface sequence
IFSHLDWTNNFSLVH

SEQ ID NO: 7109 - protein, 7 aa, Artificial
  helical interface sequence
LRPLSYP

SEQ ID NO: 7110 - protein, 21 aa, Artificial
  helical interface sequence
PQGGLQNIAVVKHNLGVLTKR

SEQ ID NO: 7111 - protein, 26 aa, Artificial
  helical interface sequence
DRRKAATMRERRRLSKVNEAFETLKR

SEQ ID NO: 7112 - protein, 7 aa, Artificial
  helical interface sequence
EAEISHT

SEQ ID NO: 7113 - protein, 15 aa, Artificial
  helical interface sequence
SDYNRTVMRNWTGKW

SEQ ID NO: 7114 - protein, 5 aa, Artificial
  helical interface sequence
FRQAY

SEQ ID NO: 7115 - protein, 8 aa, Artificial
  helical interface sequence
SLIPIMKT

SEQ ID NO: 7116 - protein, 6 aa, Artificial
  helical interface sequence
KILEDN

SEQ ID NO: 7117 - protein, 15 aa, Artificial
  helical interface sequence
EEQIAEFKEAFSLFD

SEQ ID NO: 7118 - protein, 18 aa, Artificial
  helical interface sequence
ASSRWLEGIRKWYYNAAG

SEQ ID NO: 7119 - protein, 30 aa, Artificial; identical to SEQ ID NO: 4094
  helical interface sequence

SEQ ID NO: 7120 - protein, 10 aa, Artificial
  helical interface sequence
EQTTVWLLTN

SEQ ID NO: 7121 - protein, 7 aa, Artificial
  helical interface sequence
REQVEAA

SEQ ID NO: 7122 - protein, 12 aa, Artificial
  helical interface sequence
SHLVEALYLVCG

SEQ ID NO: 7123 - protein, 22 aa, Artificial
  helical interface sequence
VGDAQVLVRYMKAELELYRLQR

SEQ ID NO: 7124 - protein, 5 aa, Artificial
  helical interface sequence
IESFF

SEQ ID NO: 7125 - protein, 20 aa, Artificial
  helical interface sequence
PENFRLLGNVIVVVLARRLG

SEQ ID NO: 7126 - protein, 13 aa, Artificial
  helical interface sequence
EEIVMHIPELADE

SEQ ID NO: 7127 - protein, 14 aa, Artificial
  helical interface sequence
EAQAQEMYRYLAIA

SEQ ID NO: 7128 - protein, 21 aa, Artificial
  helical interface sequence
NAPGAVANRVALEACVQARNE

SEQ ID NO: 7129 - protein, 21 aa, Artificial
  helical interface sequence
NAPGAVANRVALEACVQARNE

SEQ ID NO: 7130 - protein, 21 aa, Artificial
  helical interface sequence
NAPGAVANRVALEACVQARNE

SEQ ID NO: 7131 - protein, 21 aa, Artificial
  helical interface sequence
NAPGAVANRVALEACVQARNE

SEQ ID NO: 7132 - protein, 21 aa, Artificial
  helical interface sequence
NAPGAVANRVALEACVQARNE

SEQ ID NO: 7133 - protein, 21 aa, Artificial
  helical interface sequence
NAPGAVANRVALEACVQARNE

SEQ ID NO: 7134 - protein, 6 aa, Artificial
  helical interface sequence
GVEKVT

SEQ ID NO: 7135 - protein, 10 aa, Artificial
  helical interface sequence
TLSKIAQELS

SEQ ID NO: 7136 - protein, 15 aa, Artificial
  helical interface sequence
INSAARNIQHLLYGK

SEQ ID NO: 7137 - protein, 22 aa, Artificial
  helical interface sequence
IPDARNAALRAKAEAAEFRYKY

SEQ ID NO: 7138 - protein, 15 aa, Artificial
  helical interface sequence
VEILVRRLSDIKQGY

SEQ ID NO: 7139 - protein, 18 aa, Artificial
  helical interface sequence
VEEVIKLVRDSFTSATER

SEQ ID NO: 7140 - protein, 22 aa, Artificial
  helical interface sequence
AADTEAVTQLIGSNIELHSLYT

SEQ ID NO: 7141 - protein, 16 aa, Artificial
  helical interface sequence
VAAIFRFLLFFQGFHN

SEQ ID NO: 7142 - protein, 13 aa, Artificial
  helical interface sequence
ALFIAGWLFVSTG

SEQ ID NO: 7143 - protein, 7 aa, Artificial
  helical interface sequence
EEFGRFA

SEQ ID NO: 7144 - protein, 31 aa, Artificial; identical to SEQ ID NO: 1463
  helical interface sequence

SEQ ID NO: 7145 - protein, 5 aa, Artificial
  helical interface sequence
WKHIK

SEQ ID NO: 7146 - protein, 21 aa, Artificial
  helical interface sequence
NAAGAAANRVALEACVEARNQ

SEQ ID NO: 7147 - protein, 9 aa, Artificial
  helical interface sequence
LKYFLGIAG

SEQ ID NO: 7148 - protein, 12 aa, Artificial
  helical interface sequence
NCFMGCMDEHEL

SEQ ID NO: 7149 - protein, 33 aa, Artificial
  helical interface sequence
QRLQTELDVSEQVQRDFVKLSQTLQVQLERIRQ

SEQ ID NO: 7150 - protein, 33 aa, Artificial; identical to SEQ ID NO: 5236
  helical interface sequence

SEQ ID NO: 7151 - protein, 13 aa, Artificial
  helical interface sequence
HRALQLLDEVLHT

SEQ ID NO: 7152 - protein, 21 aa, Artificial
  helical interface sequence
VLRKAIDYIKYLQQVNHKLRQ

SEQ ID NO: 7153 - protein, 34 aa, Artificial
  helical interface sequence
PILYQHLFWFFGHPEVYILILPGFGMISHIVTYY

SEQ ID NO: 7154 - protein, 15 aa, Artificial
  helical interface sequence
FAVAEKRKKAYADFY

SEQ ID NO: 7155 - protein, 16 aa, Artificial
  helical interface sequence
VGEVGGEALARLLIVY

SEQ ID NO: 7156 - protein, 18 aa, Artificial
  helical interface sequence
SHVLSKVCMYFTYKVRYT

SEQ ID NO: 7157 - protein, 20 aa, Artificial
  helical interface sequence
VFPVVIMGTFACIVALSVLD

SEQ ID NO: 7158 - protein, 21 aa, Artificial
  helical interface sequence
TKEFADNLDSDFKVRQYLTKE

SEQ ID NO: 7159 - protein, 18 aa, Artificial
  helical interface sequence
RDAIKRIAYEFVEMKAKD

SEQ ID NO: 7160 - protein, 16 aa, Artificial
  helical interface sequence
VNLSNSLVEIKNILKS

SEQ ID NO: 7161 - protein, 14 aa, Artificial
  helical interface sequence
DNGAKYLIDVLQKD

SEQ ID NO: 7162 - protein, 18 aa, Artificial
  helical interface sequence
SLVFSFLYKVVQVFSEYF

SEQ ID NO: 7163 - protein, 18 aa, Artificial
  helical interface sequence
SLVFSFLYKVVQVFSEYF

SEQ ID NO: 7164 - protein, 13 aa, Artificial
  helical interface sequence
VAHLIECLLSKVA

SEQ ID NO: 7165 - protein, 5 aa, Artificial
  helical interface sequence
LEDLF

SEQ ID NO: 7166 - protein, 18 aa, Artificial
  helical interface sequence
GAHGELTGILIIRAYHED

SEQ ID NO: 7167 - protein, 12 aa, Artificial
  helical interface sequence
VEDLLSLRQVVS

SEQ ID NO: 7168 - protein, 13 aa, Artificial
  helical interface sequence
SEEEIREAFRVFD

SEQ ID NO: 7169 - protein, 13 aa, Artificial
  helical interface sequence
SEEEIREAFRVFD

SEQ ID NO: 7170 - protein, 15 aa, Artificial
  helical interface sequence
SLEKQKGVTNLLIKY

SEQ ID NO: 7171 - protein, 8 aa, Artificial
  helical interface sequence
THNRIKDE

SEQ ID NO: 7172 - protein, 17 aa, Artificial
  helical interface sequence
RELLITDLLLRIEHYLQ

SEQ ID NO: 7173 - protein, 15 aa, Artificial
  helical interface sequence
RRMGVEMTLLRALAF

SEQ ID NO: 7174 - protein, 20 aa, Artificial
  helical interface sequence
APVCAVVGGILAQEIVKALS

SEQ ID NO: 7175 - protein, 20 aa, Artificial
  helical interface sequence
ATTNAVIAGLIVLEGLKILS

SEQ ID NO: 7176 - protein, 21 aa, Artificial
  helical interface sequence
APVCAVVGGILAQEIVKALSQ

SEQ ID NO: 7177 - protein, 10 aa, Artificial
  helical interface sequence
EKELFESYIE

SEQ ID NO: 7178 - protein, 17 aa, Artificial
  helical interface sequence
LLQGRLFSYTDTQISRL

SEQ ID NO: 7179 - protein, 34 aa, Artificial; identical to SEQ ID NO: 1952
  helical interface sequence

SEQ ID NO: 7180 - protein, 10 aa, Artificial
  helical interface sequence
IFIPRLLMVD

SEQ ID NO: 7181 - protein, 20 aa, Artificial
  helical interface sequence
PEFKAHIARVLGGLDRVISM

SEQ ID NO: 7182 - protein, 15 aa, Artificial
  helical interface sequence
PGKAIAEIKKMMATY

SEQ ID NO: 7183 - protein, 35 aa, Artificial; identical to SEQ ID NO: 5251
  helical interface sequence

SEQ ID NO: 7184 - protein, 35 aa, Artificial; identical to SEQ ID NO: 5251
  helical interface sequence

SEQ ID NO: 7185 - protein, 13 aa, Artificial
  helical interface sequence
TCLRALVEMARVG

SEQ ID NO: 7186 - protein, 10 aa, Artificial
  helical interface sequence
FESHLELVKS

SEQ ID NO: 7187 - protein, 12 aa, Artificial
  helical interface sequence
DEELQEMIDEAD

SEQ ID NO: 7188 - protein, 13 aa, Artificial
  helical interface sequence
VAHLIECLLSKVA

SEQ ID NO: 7189 - protein, 9 aa, Artificial
  helical interface sequence
RSERRKWIH

SEQ ID NO: 7190 - protein, 35 aa, Artificial; identical to SEQ ID NO: 1057
  helical interface sequence

SEQ ID NO: 7191 - protein, 29 aa, Artificial
  helical interface sequence
PDEFRQAFDLAVKGINIIYNLEREALKSK

SEQ ID NO: 7192 - protein, 13 aa, Artificial
  helical interface sequence
NTQLDALANMIAE

SEQ ID NO: 7193 - protein, 15 aa, Artificial
  helical interface sequence
PEVLADSCWAISYLT

SEQ ID NO: 7194 - protein, 6 aa, Artificial
  helical interface sequence
SEQLTS

SEQ ID NO: 7195 - protein, 16 aa, Artificial
  helical interface sequence
YYGRWLLTAARILVDK

SEQ ID NO: 7196 - protein, 10 aa, Artificial
  helical interface sequence
EAIRAASLDR

SEQ ID NO: 7197 - protein, 16 aa, Artificial
  helical interface sequence
KLPFQRLVREIAQDFK

SEQ ID NO: 7198 - protein, 16 aa, Artificial
  helical interface sequence
LAAFLVVARDMLLASL

SEQ ID NO: 7199 - protein, 15 aa, Artificial
  helical interface sequence
VDLAFASVEHIMRNV

SEQ ID NO: 7200 - protein, 10 aa, Artificial
  helical interface sequence
FFFTKLKTAG

SEQ ID NO: 7201 - protein, 10 aa, Artificial
  helical interface sequence
FQETITFLQN

SEQ ID NO: 7202 - protein, 24 aa, Artificial
  helical interface sequence
PERRKPREEGLRHCLQIGVEALKA

SEQ ID NO: 7203 - protein, 15 aa, Artificial
  helical interface sequence
MDKINNRFNYLFEVN

SEQ ID NO: 7204 - protein, 27 aa, Artificial
  helical interface sequence
LEISMEQVSASIGNFTVDLFNKLNETN

SEQ ID NO: 7205 - protein, 18 aa, Artificial
  helical interface sequence
AEWEAKILELAGFLDSYI

SEQ ID NO: 7206 - protein, 18 aa, Artificial
  helical interface sequence
AEWEAKILELAGFLDSYI

SEQ ID NO: 7207 - protein, 16 aa, Artificial
  helical interface sequence
PHLLWEVVRWQLAKRR

SEQ ID NO: 7208 - protein, 16 aa, Artificial
  helical interface sequence
LKLFLAQYREVAAFAQ

SEQ ID NO: 7209 - protein, 15 aa, Artificial
  helical interface sequence
TREGNDLYREMKETG

SEQ ID NO: 7210 - protein, 11 aa, Artificial
  helical interface sequence
LGQLVEAAIQA

SEQ ID NO: 7211 - protein, 6 aa, Artificial
  helical interface sequence
PALVFN

SEQ ID NO: 7212 - protein, 9 aa, Artificial
  helical interface sequence
IDTILSSKL

SEQ ID NO: 7213 - protein, 6 aa, Artificial
  helical interface sequence
PALVFN

SEQ ID NO: 7214 - protein, 6 aa, Artificial
  helical interface sequence
QLEQEQ

SEQ ID NO: 7215 - protein, 15 aa, Artificial
  helical interface sequence
WRVRLAIIEYMPLLA

SEQ ID NO: 7216 - protein, 21 aa, Artificial
  helical interface sequence
QGALANIAVDKANLEIMTKRS

SEQ ID NO: 7217 - protein, 14 aa, Artificial
  helical interface sequence
FTSIARIGDYILKS

SEQ ID NO: 7218 - protein, 13 aa, Artificial
  helical interface sequence
AALDESKAYWMDD

SEQ ID NO: 7219 - protein, 22 aa, Artificial
  helical interface sequence
EEDTGVTNRDLISRRIKEYNNL

SEQ ID NO: 7220 - protein, 27 aa, Artificial
  helical interface sequence
QRLKRLVNEGIGYGLALEGITATDLRN

SEQ ID NO: 7221 - protein, 9 aa, Artificial
  helical interface sequence
PEEVEEVIG

SEQ ID NO: 7222 - protein, 13 aa, Artificial
  helical interface sequence
TKEEILKAFKLFD

SEQ ID NO: 7223 - protein, 20 aa, Artificial
  helical interface sequence
LLGACSGAIAGLVGVTPACG

SEQ ID NO: 7224 - protein, 19 aa, Artificial
  helical interface sequence
VNQHLCGSHLVEALYLVCG

SEQ ID NO: 7225 - protein, 10 aa, Artificial
  helical interface sequence
VRLEHVARTL

SEQ ID NO: 7226 - protein, 12 aa, Artificial
  helical interface sequence
KTTIHRIKQKEF

SEQ ID NO: 7227 - protein, 14 aa, Artificial
  helical interface sequence
IQSRFNYAWGLIKS

SEQ ID NO: 7228 - protein, 30 aa, Artificial
  helical interface sequence
GDVLYELLQHILKQRDLEAEAAAAEAAAKA

SEQ ID NO: 7229 - protein, 22 aa, Artificial
  helical interface sequence
QKAIQDEIRSVIRQITATVTFL

SEQ ID NO: 7230 - protein, 8 aa, Artificial
  helical interface sequence
YHGVAAAF

SEQ ID NO: 7231 - protein, 14 aa, Artificial
  helical interface sequence
PAEQDRLFRRVMDR

SEQ ID NO: 7232 - protein, 5 aa, Artificial
  helical interface sequence
DPAYY

SEQ ID NO: 7233 - protein, 21 aa, Artificial
  helical interface sequence
EATRAEIQIRIEANEALVKAL

SEQ ID NO: 7234 - protein, 13 aa, Artificial
  helical interface sequence
YFLQISRVNDLNR

SEQ ID NO: 7235 - protein, 13 aa, Artificial
  helical interface sequence
TEMANKAAEAVLK

SEQ ID NO: 7236 - protein, 29 aa, Artificial
  helical interface sequence
FPEFLTMMARKMKDTDSEEEIREAFRVFD

SEQ ID NO: 7237 - protein, 13 aa, Artificial
  helical interface sequence
VDEAKRLFEDNYK

SEQ ID NO: 7238 - protein, 5 aa, Artificial
  helical interface sequence
LPSRM

SEQ ID NO: 7239 - protein, 5 aa, Artificial
  helical interface sequence
FQASI

SEQ ID NO: 7240 - protein, 17 aa, Artificial
  helical interface sequence
QADDYGAEALERMFVTY

SEQ ID NO: 7241 - protein, 9 aa, Artificial
  helical interface sequence
WFDILDDWL

SEQ ID NO: 7242 - protein, 17 aa, Artificial
  helical interface sequence
FCTPGIVMSMYTLLRNQ

SEQ ID NO: 7243 - protein, 21 aa, Artificial
  helical interface sequence
FEEFKYLWNNIKKWQGIYKRF

SEQ ID NO: 7244 - protein, 16 aa, Artificial
  helical interface sequence
PSTALRELIEELVNIT

SEQ ID NO: 7245 - protein, 60 aa, Artificial; identical to SEQ ID NO: 2060
  helical interface sequence

SEQ ID NO: 7246 - protein, 27 aa, Artificial
  helical interface sequence
SEELVAEAHNLCTLLENAIQDTVREQG

SEQ ID NO: 7247 - protein, 12 aa, Artificial
  helical interface sequence
SREIQTAVRLLL

SEQ ID NO: 7248 - protein, 29 aa, Artificial
  helical interface sequence
SKAMSIMNSFVNDVFERIAGEASRLAHYN

SEQ ID NO: 7249 - protein, 22 aa, Artificial
  helical interface sequence
VGDAQVLVRYMKAELELYRLQR

SEQ ID NO: 7250 - protein, 16 aa, Artificial
  helical interface sequence
TELVNKISENCFEKCL

SEQ ID NO: 7251 - protein, 13 aa, Artificial
  helical interface sequence
EEIVMHIPELADE

SEQ ID NO: 7252 - protein, 9 aa, Artificial
  helical interface sequence
QKFQSIVIG

SEQ ID NO: 7253 - protein, 23 aa, Artificial
  helical interface sequence
LICGLRQLANETTQALQLFLRAT

SEQ ID NO: 7254 - protein, 11 aa, Artificial
  helical interface sequence
LTEVYCLVNRA

SEQ ID NO: 7255 - protein, 12 aa, Artificial
  helical interface sequence
ALKLVRESELLG

SEQ ID NO: 7256 - protein, 5 aa, Artificial
  helical interface sequence
YELTR

SEQ ID NO: 7257 - protein, 17 aa, Artificial
  helical interface sequence
KQYESVLMVSIDQLLDS

SEQ ID NO: 7258 - protein, 32 aa, Artificial; identical to SEQ ID NO: 2508
  helical interface sequence

SEQ ID NO: 7259 - protein, 8 aa, Artificial
  helical interface sequence
LEEMMTAC

SEQ ID NO: 7260 - protein, 11 aa, Artificial
  helical interface sequence
RLPALRSIGLK

SEQ ID NO: 7261 - protein, 12 aa, Artificial
  helical interface sequence
SYVKEELSKAAF

SEQ ID NO: 7262 - protein, 25 aa, Artificial
  helical interface sequence
EQCERARRLQAKMMTNLVMAKDRLQ

SEQ ID NO: 7263 - protein, 7 aa, Artificial
  helical interface sequence
TLDYVVH

SEQ ID NO: 7264 - protein, 11 aa, Artificial
  helical interface sequence
ATMMKGRLRKI

SEQ ID NO: 7265 - protein, 7 aa, Artificial
  helical interface sequence
KQVKSVA

SEQ ID NO: 7266 - protein, 14 aa, Artificial
  helical interface sequence
TRPAAQFVKEAKGF

SEQ ID NO: 7267 - protein, 8 aa, Artificial
  helical interface sequence
LATLEPLV

SEQ ID NO: 7268 - protein, 7 aa, Artificial
  helical interface sequence
IAELLPH

SEQ ID NO: 7269 - protein, 11 aa, Artificial
  helical interface sequence
PYVAAAHLLGA

SEQ ID NO: 7270 - protein, 13 aa, Artificial
  helical interface sequence
PLDEIKRAFQLFD

SEQ ID NO: 7271 - protein, 43 aa, Artificial
  helical interface sequence
LRSRIEVLKRKVIEKVQHIQLLQKNVRAQLVDMKRLEVDIDIK

SEQ ID NO: 7272 - protein, 17 aa, Artificial
  helical interface sequence
RELLITDLLLRIEHYLQ

SEQ ID NO: 7273 - protein, 22 aa, Artificial
  helical interface sequence
GTESNNLVIHSVVKHFHANQTS

SEQ ID NO: 7274 - protein, 6 aa, Artificial
  helical interface sequence
PIEMYL

SEQ ID NO: 7275 - protein, 11 aa, Artificial
  helical interface sequence
REWVLKIAKLA

SEQ ID NO: 7276 - protein, 11 aa, Artificial
  helical interface sequence
DTLCGIRKLTL

SEQ ID NO: 7277 - protein, 7 aa, Artificial
  helical interface sequence
SLEKVMG

SEQ ID NO: 7278 - protein, 5 aa, Artificial
  helical interface sequence
EAEIS

SEQ ID NO: 7279 - protein, 9 aa, Artificial
  helical interface sequence
PRKVLSEMG

SEQ ID NO: 7280 - protein, 27 aa, Artificial
  helical interface sequence
IYEETRGVLKVFLENVIRDAVTYTEHA

SEQ ID NO: 7281 - protein, 7 aa, Artificial
  helical interface sequence
EELNKLL

SEQ ID NO: 7282 - protein, 14 aa, Artificial
  helical interface sequence
ERSWFREAEIYQTV

SEQ ID NO: 7283 - protein, 19 aa, Artificial
  helical interface sequence
DKEYQIMRNASMAVLREIG

SEQ ID NO: 7284 - protein, 6 aa, Artificial
  helical interface sequence
SEQLTS

SEQ ID NO: 7285 - protein, 12 aa, Artificial
  helical interface sequence
YGTWHHRCWLLS

SEQ ID NO: 7286 - protein, 6 aa, Artificial
  helical interface sequence
TFLMEM

SEQ ID NO: 7287 - protein, 5 aa, Artificial
  helical interface sequence
DRLRP

SEQ ID NO: 7288 - protein, 7 aa, Artificial
  helical interface sequence
LHELAQY

SEQ ID NO: 7289 - protein, 8 aa, Artificial
  helical interface sequence
PEEIRKTF

SEQ ID NO: 7290 - protein, 14 aa, Artificial
  helical interface sequence
FGAHMANPLLRKVV

SEQ ID NO: 7291 - protein, 22 aa, Artificial
  helical interface sequence
AADTEAVTQLIGSNIELHSLYT

SEQ ID NO: 7292 - protein, 45 aa, Artificial; identical to SEQ ID NO: 5362
  helical interface sequence

SEQ ID NO: 7293 - protein, 19 aa, Artificial
  helical interface sequence
PGSFHLLTDCIIVELAYLR

SEQ ID NO: 7294 - protein, 13 aa, Artificial
  helical interface sequence
TAQIDALSQMVAE

SEQ ID NO: 7295 - protein, 10 aa, Artificial
  helical interface sequence
LPVYRELIQA

SEQ ID NO: 7296 - protein, 30 aa, Artificial; identical to SEQ ID NO: 4430
  helical interface sequence

SEQ ID NO: 7297 - protein, 11 aa, Artificial
  helical interface sequence
EEQIYELFSKS

SEQ ID NO: 7298 - protein, 11 aa, Artificial
  helical interface sequence
EEQIYELFSKS

SEQ ID NO: 7299 - protein, 13 aa, Artificial
  helical interface sequence
AATGDFAYAAKAE

SEQ ID NO: 7300 - protein, 15 aa, Artificial
  helical interface sequence
QSVMEELKRIIIDSE

SEQ ID NO: 7301 - protein, 14 aa, Artificial
  helical interface sequence
TLIMQLLRDNLTLW

SEQ ID NO: 7302 - protein, 11 aa, Artificial
  helical interface sequence
PRHLQLAIRND

SEQ ID NO: 7303 - protein, 14 aa, Artificial
  helical interface sequence
DEQIAAQVDYIVAN

SEQ ID NO: 7304 - protein, 9 aa, Artificial
  helical interface sequence
TADARIVIN

SEQ ID NO: 7305 - protein, 10 aa, Artificial
  helical interface sequence
SVYAYGVMDR

SEQ ID NO: 7306 - protein, 8 aa, Artificial
  helical interface sequence
PEKIRSWS

SEQ ID NO: 7307 - protein, 21 aa, Artificial
  helical interface sequence
EREKKKKILAERRKVLAIDHL

SEQ ID NO: 7308 - protein, 22 aa, Artificial
  helical interface sequence
AQGALANIAVDKANLEIMTKRS

SEQ ID NO: 7309 - protein, 14 aa, Artificial
  helical interface sequence
FGAHMANPLLRKVV

SEQ ID NO: 7310 - protein, 7 aa, Artificial
  helical interface sequence
LYGCADP

SEQ ID NO: 7311 - protein, 20 aa, Artificial
  helical interface sequence
EKMLQRALELLAFLKEDLEK

SEQ ID NO: 7312 - protein, 17 aa, Artificial
  helical interface sequence
LQLVGTAAMLLASKFEE

SEQ ID NO: 7313 - protein, 15 aa, Artificial
  helical interface sequence
IFSHLDWTNNFSLVH

SEQ ID NO: 7314 - protein, 10 aa, Artificial
  helical interface sequence
KILHRLLQEG

SEQ ID NO: 7315 - protein, 13 aa, Artificial
  helical interface sequence
PEAWAGFVDFLQN

SEQ ID NO: 7316 - protein, 47 aa, Artificial; identical to SEQ ID NO: 146
  helical interface sequence

SEQ ID NO: 7317 - protein, 26 aa, Artificial
  helical interface sequence
PEPIIKSLWAVTVVATIVILFVALYW

SEQ ID NO: 7318 - protein, 12 aa, Artificial
  helical interface sequence
PGELDRIKSFVL

SEQ ID NO: 7319 - protein, 5 aa, Artificial
  helical interface sequence
FKRNR

SEQ ID NO: 7320 - protein, 7 aa, Artificial
  helical interface sequence
WKDVKAK

SEQ ID NO: 7321 - protein, 21 aa, Artificial
  helical interface sequence
EDESYARAYRIIRAHQTELTH

SEQ ID NO: 7322 - protein, 16 aa, Artificial
  helical interface sequence
SLYTQLEMLVQGAERL

SEQ ID NO: 7323 - protein, 19 aa, Artificial
  helical interface sequence
PDSLENIPEKWTPEVKHFC

SEQ ID NO: 7324 - protein, 8 aa, Artificial
  helical interface sequence
VGCGQYSR

SEQ ID NO: 7325 - protein, 10 aa, Artificial
  helical interface sequence
DIFREIASSM

SEQ ID NO: 7326 - protein, 30 aa, Artificial; identical to SEQ ID NO: 2910
  helical interface sequence

SEQ ID NO: 7327 - protein, 9 aa, Artificial
  helical interface sequence
EAVEQLLEE

SEQ ID NO: 7328 - protein, 7 aa, Artificial
  helical interface sequence
EYEALTV

SEQ ID NO: 7329 - protein, 12 aa, Artificial
  helical interface sequence
ELGRPDAEYWNS

SEQ ID NO: 7330 - protein, 14 aa, Artificial
  helical interface sequence
YTVWHFRRVLLRSL

SEQ ID NO: 7331 - protein, 23 aa, Artificial
  helical interface sequence
AEYRTKMAGVMLRRAVERAKARA

SEQ ID NO: 7332 - protein, 8 aa, Artificial
  helical interface sequence
SLIPIMKT

SEQ ID NO: 7333 - protein, 13 aa, Artificial
  helical interface sequence
SEEEIREAFRVFD

SEQ ID NO: 7334 - protein, 28 aa, Artificial
  helical interface sequence
NVKRRTHNVLERQRRNELKRSFFALRDQ

SEQ ID NO: 7335 - protein, 7 aa, Artificial
  helical interface sequence
PLMQELF

SEQ ID NO: 7336 - protein, 20 aa, Artificial
  helical interface sequence
ENLYDDRVFRIKRALDLSMR

SEQ ID NO: 7337 - protein, 7 aa, Artificial
  helical interface sequence
REQVEAA

SEQ ID NO: 7338 - protein, 34 aa, Artificial
  helical interface sequence
FRLVRLLRFLRILLIISRGSKFLSAIADAADKLV

SEQ ID NO: 7339 - protein, 10 aa, Artificial
  helical interface sequence
HEDQIALLKG

SEQ ID NO: 7340 - protein, 26 aa, Artificial
  helical interface sequence
FSKGLIIQFIDQAQTTFAQMQRQLDG

SEQ ID NO: 7341 - protein, 27 aa, Artificial
  helical interface sequence
PWHGFSIGFAYGCGLLFAAHGATILAV

SEQ ID NO: 7342 - protein, 24 aa, Artificial
  helical interface sequence
HIPFAFAFAILAYLTLVLFRPVMM

SEQ ID NO: 7343 - protein, 14 aa, Artificial
  helical interface sequence
IFSHLDWTNNFSLV

SEQ ID NO: 7344 - protein, 23 aa, Artificial
  helical interface sequence
AGIAIELVRLFAVELEHYEKIEG

SEQ ID NO: 7345 - protein, 7 aa, Artificial
  helical interface sequence
LLMLTLG

SEQ ID NO: 7346 - protein, 11 aa, Artificial
  helical interface sequence
DDYVHEFCRYG

SEQ ID NO: 7347 - protein, 21 aa, Artificial
  helical interface sequence
NAPGAVANRVALEACVKARNE

SEQ ID NO: 7348 - protein, 19 aa, Artificial
  helical interface sequence
EQTLQDLKNIWQKKLTETK

SEQ ID NO: 7349 - protein, 14 aa, Artificial
  helical interface sequence
LPLVKAIATNIKKH

SEQ ID NO: 7350 - protein, 14 aa, Artificial
  helical interface sequence
YSGFYTFSLLDHHY

SEQ ID NO: 7351 - protein, 6 aa, Artificial
  helical interface sequence
PDEYEQ

SEQ ID NO: 7352 - protein, 20 aa, Artificial
  helical interface sequence
DSQKKAIERMKDTLRIAYLT

SEQ ID NO: 7353 - protein, 13 aa, Artificial
  helical interface sequence
FACIIALFFFAIF

SEQ ID NO: 7354 - protein, 13 aa, Artificial
  helical interface sequence
ADESLESTRRMLQ

SEQ ID NO: 7355 - protein, 17 aa, Artificial
  helical interface sequence
FCTAGMLATARSILAEN

SEQ ID NO: 7356 - protein, 5 aa, Artificial
  helical interface sequence
PRTFG

SEQ ID NO: 7357 - protein, 10 aa, Artificial
  helical interface sequence
FEEFCAVVGG

SEQ ID NO: 7358 - protein, 18 aa, Artificial
  helical interface sequence
HHTAEELREQVTDVLENR

SEQ ID NO: 7359 - protein, 23 aa, Artificial
  helical interface sequence
PKETLSERLSALQDKIIDHYEND

SEQ ID NO: 7360 - protein, 10 aa, Artificial
  helical interface sequence
FDQLVSQVAK

SEQ ID NO: 7361 - protein, 6 aa, Artificial
  helical interface sequence
WTDGLT

SEQ ID NO: 7362 - protein, 21 aa, Artificial
  helical interface sequence
NAPGAAANRVALEACTQARNE

SEQ ID NO: 7363 - protein, 16 aa, Artificial
  helical interface sequence
QEDFGAEALERMFIVY

SEQ ID NO: 7364 - protein, 15 aa, Artificial
  helical interface sequence
PEIALELLMAANFLD

SEQ ID NO: 7365 - protein, 11 aa, Artificial
  helical interface sequence
EEEIREMLRRV

SEQ ID NO: 7366 - protein, 15 aa, Artificial
  helical interface sequence
EWKVLEELRRLAAQN

SEQ ID NO: 7367 - protein, 10 aa, Artificial
  helical interface sequence
TQMQRLTKYP

SEQ ID NO: 7368 - protein, 7 aa, Artificial
  helical interface sequence
RFAKLLL

SEQ ID NO: 7369 - protein, 13 aa, Artificial
  helical interface sequence
SEEEIREAFRVFD

SEQ ID NO: 7370 - protein, 9 aa, Artificial
  helical interface sequence
EDNFVKFFK

SEQ ID NO: 7371 - protein, 29 aa, Artificial
  helical interface sequence
RFAKLLLRLPALRSIGLKCLEHLFFFKLI

SEQ ID NO: 7372 - protein, 15 aa, Artificial
  helical interface sequence
RRMGVEMTLLRALAF

SEQ ID NO: 7373 - protein, 14 aa, Artificial
  helical interface sequence
PLVVKKLLDLFLKS

SEQ ID NO: 7374 - protein, 21 aa, Artificial
  helical interface sequence
ATTNAVIAGLIVLEGLKILSG

SEQ ID NO: 7375 - protein, 23 aa, Artificial
  helical interface sequence
VGDAQVLVRYMKAELELYRLQRR

SEQ ID NO: 7376 - protein, 17 aa, Artificial
  helical interface sequence
LLQGRLFSYTDTQISRL

SEQ ID NO: 7377 - protein, 13 aa, Artificial
  helical interface sequence
FHRRELWEAIEAG

SEQ ID NO: 7378 - protein, 6 aa, Artificial
  helical interface sequence
PFWQKV

SEQ ID NO: 7379 - protein, 5 aa, Artificial
  helical interface sequence
PHQWQ

SEQ ID NO: 7380 - protein, 13 aa, Artificial
  helical interface sequence
IEGRNAAYQAIIK

SEQ ID NO: 7381 - protein, 7 aa, Artificial
  helical interface sequence
LEQLIAA

SEQ ID NO: 7382 - protein, 19 aa, Artificial
  helical interface sequence
PLLQQIHNITSFIRQAKAA

SEQ ID NO: 7383 - protein, 10 aa, Artificial
  helical interface sequence
QVEYALESIS

SEQ ID NO: 7384 - protein, 21 aa, Artificial
  helical interface sequence
NADSRILIEKARVEAQSHRLT

SEQ ID NO: 7385 - protein, 29 aa, Artificial
  helical interface sequence
SSAVMALQEASEAYLVALFEDTNLCAIHA

SEQ ID NO: 7386 - protein, 11 aa, Artificial
  helical interface sequence
AMDVVYALKRQ

SEQ ID NO: 7387 - protein, 7 aa, Artificial
  helical interface sequence
EEFGRFA

SEQ ID NO: 7388 - protein, 13 aa, Artificial
  helical interface sequence
AVDTYCRHNYGVG

SEQ ID NO: 7389 - protein, 16 aa, Artificial
  helical interface sequence
SDAIGNDALSRMIVVY

SEQ ID NO: 7390 - protein, 6 aa, Artificial
  helical interface sequence
PSFWWN

SEQ ID NO: 7391 - protein, 10 aa, Artificial
  helical interface sequence
EQTTVWLLTN

SEQ ID NO: 7392 - protein, 12 aa, Artificial
  helical interface sequence
ACHLRKATCLLG

SEQ ID NO: 7393 - protein, 18 aa, Artificial
  helical interface sequence
GPEASQAQAMTFLIRDQK

SEQ ID NO: 7394 - protein, 27 aa, Artificial
  helical interface sequence
DRSKQLIFLGSGLWIALVLVVGVLNFF

SEQ ID NO: 7395 - protein, 25 aa, Artificial
  helical interface sequence
GLIATALFVLVPSVFLIILYVQTES

SEQ ID NO: 7396 - protein, 25 aa, Artificial
  helical interface sequence
GLIATALFVLVPSVFLIILYVQTES

SEQ ID NO: 7397 - protein, 7 aa, Artificial
  helical interface sequence
ERELLES

SEQ ID NO: 7398 - protein, 7 aa, Artificial
  helical interface sequence
RHVMTNL

SEQ ID NO: 7399 - protein, 14 aa, Artificial
  helical interface sequence
IRSRYNLGISCINL

SEQ ID NO: 7400 - protein, 12 aa, Artificial
  helical interface sequence
KANLVFKEIEKK

SEQ ID NO: 7401 - protein, 12 aa, Artificial
  helical interface sequence
ESVYKASLNLIE

SEQ ID NO: 7402 - protein, 14 aa, Artificial
  helical interface sequence
AGREGLDALLATSA

SEQ ID NO: 7403 - protein, 16 aa, Artificial
  helical interface sequence
QQASSAFQFAQALIAD

SEQ ID NO: 7404 - protein, 8 aa, Artificial
  helical interface sequence
DEEVDEMI

SEQ ID NO: 7405 - protein, 21 aa, Artificial
  helical interface sequence
ADAELQRLKNERHEEAELERL

SEQ ID NO: 7406 - protein, 10 aa, Artificial
  helical interface sequence
PNYRRRLVRW

SEQ ID NO: 7407 - protein, 37 aa, Artificial; identical to SEQ ID NO: 2853
  helical interface sequence

SEQ ID NO: 7408 - protein, 13 aa, Artificial
  helical interface sequence
LFLVAAHEFGHSL

SEQ ID NO: 7409 - protein, 9 aa, Artificial
  helical interface sequence
AAEVEFLAE

SEQ ID NO: 7410 - protein, 10 aa, Artificial
  helical interface sequence
GTFLTQALNH

SEQ ID NO: 7411 - protein, 35 aa, Artificial; identical to SEQ ID NO: 1058
  helical interface sequence

SEQ ID NO: 7412 - protein, 11 aa, Artificial
  helical interface sequence
EAIRAASLDRG

SEQ ID NO: 7413 - protein, 6 aa, Artificial
  helical interface sequence
VGAEER

SEQ ID NO: 7414 - protein, 6 aa, Artificial
  helical interface sequence
PSYWWN

SEQ ID NO: 7415 - protein, 6 aa, Artificial
  helical interface sequence
PSYWWN

SEQ ID NO: 7416 - protein, 23 aa, Artificial
  helical interface sequence
AAVAVEFARLYAVELEHYEKLEG

SEQ ID NO: 7417 - protein, 52 aa, Artificial; identical to SEQ ID NO: 499
  helical interface sequence

SEQ ID NO: 7418 - protein, 32 aa, Artificial; identical to SEQ ID NO: 6008
  helical interface sequence

SEQ ID NO: 7419 - protein, 13 aa, Artificial
  helical interface sequence
FIDYAIEYSEKYA

SEQ ID NO: 7420 - protein, 35 aa, Artificial
  helical interface sequence
KPFVRWLTDLCVQLSEVERQIHEIVRAYEWAHHDM

SEQ ID NO: 7421 - protein, 15 aa, Artificial
  helical interface sequence
MDKINNRFNYLFEVN

SEQ ID NO: 7422 - protein, 11 aa, Artificial
  helical interface sequence
YNSNNQKIVNL

SEQ ID NO: 7423 - protein, 14 aa, Artificial
  helical interface sequence
YAWEALEVVLIGAA

SEQ ID NO: 7424 - protein, 6 aa, Artificial
  helical interface sequence
PALVFN

SEQ ID NO: 7425 - protein, 6 aa, Artificial
  helical interface sequence
PALVFN

SEQ ID NO: 7426 - protein, 30 aa, Artificial
  helical interface sequence
EETQKQLLRLLVPLRHVELGANMNNAKIAG

SEQ ID NO: 7427 - protein, 25 aa, Artificial
  helical interface sequence
PEGLRVFYYLVQDLKCLVFSLIGLH

SEQ ID NO: 7428 - protein, 22 aa, Artificial
  helical interface sequence
EEDTGVTNRDLISRRIKEYNNL

SEQ ID NO: 7429 - protein, 16 aa, Artificial
  helical interface sequence
IGYGLALEGITATDLR

SEQ ID NO: 7430 - protein, 8 aa, Artificial
  helical interface sequence
LERYLQLC

SEQ ID NO: 7431 - protein, 28 aa, Artificial
  helical interface sequence
GLWQIITICATGAFVSWALREVEICRKL

SEQ ID NO: 7432 - protein, 15 aa, Artificial
  helical interface sequence
IFSHLDWTNNFSLVH

SEQ ID NO: 7433 - protein, 16 aa, Artificial
  helical interface sequence
PDLRDRGYIYWRLLST

SEQ ID NO: 7434 - protein, 7 aa, Artificial
  helical interface sequence
ELDLVFN

SEQ ID NO: 7435 - protein, 22 aa, Artificial
  helical interface sequence
SPLDQAIGLLIGIFHKYSGKEG

SEQ ID NO: 7436 - protein, 14 aa, Artificial
  helical interface sequence
VATHRKAQRAVNLI

SEQ ID NO: 7437 - protein, 9 aa, Artificial
  helical interface sequence
DRLRPLSYP

SEQ ID NO: 7438 - protein, 25 aa, Artificial
  helical interface sequence
ISSYLIKPVQRITKYQLLLKELLTC

SEQ ID NO: 7439 - protein, 12 aa, Artificial
  helical interface sequence
SREIQTAVRLLL

SEQ ID NO: 7440 - protein, 22 aa, Artificial
  helical interface sequence
LPHMADMSTYMFKGIISFAKVI

SEQ ID NO: 7441 - protein, 6 aa, Artificial
  helical interface sequence
LNNIVK

SEQ ID NO: 7442 - protein, 16 aa, Artificial
  helical interface sequence
PGTAYQSFEQVVNELF

SEQ ID NO: 7443 - protein, 8 aa, Artificial
  helical interface sequence
IYDICRRN

SEQ ID NO: 7444 - protein, 6 aa, Artificial
  helical interface sequence
QFWDLN

SEQ ID NO: 7445 - protein, 16 aa, Artificial
  helical interface sequence
RYEIARVISARALQLA

SEQ ID NO: 7446 - protein, 11 aa, Artificial
  helical interface sequence
EDELFRLSQLG

SEQ ID NO: 7447 - protein, 18 aa, Artificial
  helical interface sequence
VNDERLGVKILTDIYKEA

SEQ ID NO: 7448 - protein, 14 aa, Artificial
  helical interface sequence
RYVSKLVVISLSNR

SEQ ID NO: 7449 - protein, 7 aa, Artificial
  helical interface sequence
IEEDFNA

SEQ ID NO: 7450 - protein, 11 aa, Artificial
  helical interface sequence
ADVKDNLTKMG

SEQ ID NO: 7451 - protein, 7 aa, Artificial
  helical interface sequence
DEQLKSG

SEQ ID NO: 7452 - protein, 10 aa, Artificial
  helical interface sequence
PEVFVSMLLE

SEQ ID NO: 7453 - protein, 14 aa, Artificial
  helical interface sequence
GELSAKWAPIAAEA

SEQ ID NO: 7454 - protein, 11 aa, Artificial
  helical interface sequence
LVTVTAELAAS

SEQ ID NO: 7455 - protein, 15 aa, Artificial
  helical interface sequence
DEVGAEALGRLLVVY

SEQ ID NO: 7456 - protein, 21 aa, Artificial
  helical interface sequence
WGRIVTLISFGAFVAKHLKSV

SEQ ID NO: 7457 - protein, 11 aa, Artificial
  helical interface sequence
AFTKVAAQADT

SEQ ID NO: 7458 - protein, 12 aa, Artificial
  helical interface sequence
AFTKVAAQADTR

SEQ ID NO: 7459 - protein, 5 aa, Artificial
  helical interface sequence
FEDFQ

SEQ ID NO: 7460 - protein, 18 aa, Artificial
  helical interface sequence
EEDKLTVSRARKIQRFLS

SEQ ID NO: 7461 - protein, 9 aa, Artificial
  helical interface sequence
RKFLMECRN

SEQ ID NO: 7462 - protein, 14 aa, Artificial
  helical interface sequence
DSEEEIREAFRVFD

SEQ ID NO: 7463 - protein, 8 aa, Artificial
  helical interface sequence
QLYHQVSK

SEQ ID NO: 7464 - protein, 10 aa, Artificial
  helical interface sequence
STYIKFVNLF

SEQ ID NO: 7465 - protein, 15 aa, Artificial
  helical interface sequence
LKSTLRVLYNLFTKY

SEQ ID NO: 7466 - protein, 16 aa, Artificial
  helical interface sequence
AGEYGAEAYERMFLSF

SEQ ID NO: 7467 - protein, 13 aa, Artificial
  helical interface sequence
MRHILLVADVMTR

SEQ ID NO: 7468 - protein, 14 aa, Artificial
  helical interface sequence
DFRRLWIVRINAAC

SEQ ID NO: 7469 - protein, 24 aa, Artificial
  helical interface sequence
FKKMSEAKYQLQKIYNEIDEALKS

SEQ ID NO: 7470 - protein, 24 aa, Artificial
  helical interface sequence
FKKMSEAKYQLQKIYNEIDEALKS

SEQ ID NO: 7471 - protein, 12 aa, Artificial
  helical interface sequence
EAQRALIERAFF

SEQ ID NO: 7472 - protein, 7 aa, Artificial
  helical interface sequence
GSYQEII

SEQ ID NO: 7473 - protein, 7 aa, Artificial
  helical interface sequence
GEVFIRA

SEQ ID NO: 7474 - protein, 8 aa, Artificial
  helical interface sequence
PEDRAGEG

SEQ ID NO: 7475 - protein, 6 aa, Artificial
  helical interface sequence
DIINRA

SEQ ID NO: 7476 - protein, 20 aa, Artificial
  helical interface sequence
WFGVIMIPTLLAATICFVIA

SEQ ID NO: 7477 - protein, 9 aa, Artificial
  helical interface sequence
KINLLGFLG

SEQ ID NO: 7478 - protein, 17 aa, Artificial
  helical interface sequence
SQLIFNAQALKDRYEGN

SEQ ID NO: 7479 - protein, 15 aa, Artificial
  helical interface sequence
HASDVLLNLNRLRSR

SEQ ID NO: 7480 - protein, 12 aa, Artificial
  helical interface sequence
SREIQTAVRLLL

SEQ ID NO: 7481 - protein, 16 aa, Artificial
  helical interface sequence
ATLWNCRREVLQHLET

SEQ ID NO: 7482 - protein, 18 aa, Artificial
  helical interface sequence
GATFAVSGLLIGEWINRY

SEQ ID NO: 7483 - protein, 26 aa, Artificial
  helical interface sequence
DACIDQCLAKYMRSWNVISKAYISRI

SEQ ID NO: 7484 - protein, 16 aa, Artificial
  helical interface sequence
TELVNKISENCFEKCL

SEQ ID NO: 7485 - protein, 10 aa, Artificial
  helical interface sequence
DPILPGLFDG

SEQ ID NO: 7486 - protein, 20 aa, Artificial
  helical interface sequence
YLEPYLKEVIRERLEREAWN

SEQ ID NO: 7487 - protein, 10 aa, Artificial
  helical interface sequence
INYTKLKNAV

SEQ ID NO: 7488 - protein, 5 aa, Artificial
  helical interface sequence
FDDLI

SEQ ID NO: 7489 - protein, 9 aa, Artificial
  helical interface sequence
PGELDRIKN

SEQ ID NO: 7490 - protein, 9 aa, Artificial
  helical interface sequence
PGELDRIKN

SEQ ID NO: 7491 - protein, 6 aa, Artificial
  helical interface sequence
DSTNKE

SEQ ID NO: 7492 - protein, 9 aa, Artificial
  helical interface sequence
MRDNWRSEL

SEQ ID NO: 7493 - protein, 23 aa, Artificial
  helical interface sequence
LVDVSKIITLTQEFRRHYDSVYR

SEQ ID NO: 7494 - protein, 24 aa, Artificial
  helical interface sequence
AAEYYRAYLEGECVEWLHRYLKNG

SEQ ID NO: 7495 - protein, 25 aa, Artificial
  helical interface sequence
EQCERARRLQAKMMTNLVMAKDRLQ

SEQ ID NO: 7496 - protein, 16 aa, Artificial
  helical interface sequence
TTRALHERFDRLERML

SEQ ID NO: 7497 - protein, 23 aa, Artificial
  helical interface sequence
SSALRGTVNSYLRWIKAAIDVIE

SEQ ID NO: 7498 - protein, 9 aa, Artificial
  helical interface sequence
RDWAESTLM

SEQ ID NO: 7499 - protein, 23 aa, Artificial
  helical interface sequence
IEFRRTLTLSFFFKFYLTVLKKL

SEQ ID NO: 7500 - protein, 5 aa, Artificial
  helical interface sequence
DGRLA

SEQ ID NO: 7501 - protein, 19 aa, Artificial
  helical interface sequence
PAVHASLDKFLASVSTVLT

SEQ ID NO: 7502 - protein, 9 aa, Artificial
  helical interface sequence
ENEFIAICT

SEQ ID NO: 7503 - protein, 11 aa, Artificial
  helical interface sequence
IKNLRRVAKEL

SEQ ID NO: 7504 - protein, 22 aa, Artificial
  helical interface sequence
KESTQKAIDGVTNKVNSIIDKM

SEQ ID NO: 7505 - protein, 21 aa, Artificial
  helical interface sequence
IYNSNNQKIVNLKEKVAQLEA

SEQ ID NO: 7506 - protein, 17 aa, Artificial
  helical interface sequence
RELLITDLLLRIEHYLQ

SEQ ID NO: 7507 - protein, 5 aa, Artificial
  helical interface sequence
QLKEL

SEQ ID NO: 7508 - protein, 6 aa, Artificial
  helical interface sequence
PIEMYL

SEQ ID NO: 7509 - protein, 13 aa, Artificial
  helical interface sequence
IFEMYARTRDEGF

SEQ ID NO: 7510 - protein, 13 aa, Artificial
  helical interface sequence
IFEMYARTRDEGF

SEQ ID NO: 7511 - protein, 14 aa, Artificial
  helical interface sequence
ILTILTEVNYEVSN

SEQ ID NO: 7512 - protein, 10 aa, Artificial
  helical interface sequence
DVNRIFERVV

SEQ ID NO: 7513 - protein, 8 aa, Artificial
  helical interface sequence
PIDIRILN

SEQ ID NO: 7514 - protein, 11 aa, Artificial
  helical interface sequence
LWVNLAIQVLN

SEQ ID NO: 7515 - protein, 16 aa, Artificial
  helical interface sequence
AGEYGAEALERMFLSF

SEQ ID NO: 7516 - protein, 16 aa, Artificial
  helical interface sequence
YYERYVIGVATLMVEK

SEQ ID NO: 7517 - protein, 17 aa, Artificial
  helical interface sequence
PDSILRVLSQMQKIVRV

SEQ ID NO: 7518 - protein, 13 aa, Artificial
  helical interface sequence
AESEKEWKEWLKT

SEQ ID NO: 7519 - protein, 12 aa, Artificial
  helical interface sequence
IVTKSIVNADAE

SEQ ID NO: 7520 - protein, 12 aa, Artificial
  helical interface sequence
AFSRVVVTSDAK

SEQ ID NO: 7521 - protein, 35 aa, Artificial
  helical interface sequence
SRESDPSRKGFSYLVTAVTTLGVAYAAKNVVTQFV

SEQ ID NO: 7522 - protein, 17 aa, Artificial
  helical interface sequence
RRKWQKTGHAVRAIGRL

SEQ ID NO: 7523 - protein, 10 aa, Artificial
  helical interface sequence
FRGLNRIQTQ

SEQ ID NO: 7524 - protein, 27 aa, Artificial
  helical interface sequence
STEIQTAFGRFRQASASLAAAKALTEK

SEQ ID NO: 7525 - protein, 15 aa, Artificial
  helical interface sequence
ESAWNYLKGILQDRG

SEQ ID NO: 7526 - protein, 22 aa, Artificial
  helical interface sequence
PQGGLQNIATGKHNLEILTKRS

SEQ ID NO: 7527 - protein, 29 aa, Artificial
  helical interface sequence
PEANLVCTAHYLQALRAQVEVAKGMAVFG

SEQ ID NO: 7528 - protein, 15 aa, Artificial
  helical interface sequence
YRQYLTFKTHKDLMR

SEQ ID NO: 7529 - protein, 15 aa, Artificial
  helical interface sequence
YRQYLTFKTHKDLMR

SEQ ID NO: 7530 - protein, 15 aa, Artificial
  helical interface sequence
YRQYLTFKTHKDLMR

SEQ ID NO: 7531 - protein, 15 aa, Artificial
  helical interface sequence
YRQYLTFKTHKDLMR

SEQ ID NO: 7532 - protein, 7 aa, Artificial
  helical interface sequence
HVPFAFS

SEQ ID NO: 7533 - protein, 20 aa, Artificial
  helical interface sequence
EEDCRQMIYRSEREHDARMV

SEQ ID NO: 7534 - protein, 20 aa, Artificial
  helical interface sequence
EEDCRQMIYRSEREHDARMV

SEQ ID NO: 7535 - protein, 7 aa, Artificial
  helical interface sequence
PWTQRFF

SEQ ID NO: 7536 - protein, 30 aa, Artificial; identical to SEQ ID NO: 5911
  helical interface sequence

SEQ ID NO: 7537 - protein, 8 aa, Artificial
  helical interface sequence
FQVEYSLE

SEQ ID NO: 7538 - protein, 8 aa, Artificial
  helical interface sequence
FQVEYSLE

SEQ ID NO: 7539 - protein, 12 aa, Artificial
  helical interface sequence
QTFAYGVLDSNY

SEQ ID NO: 7540 - protein, 14 aa, Artificial
  helical interface sequence
YHAWQHRQWVIQEF

SEQ ID NO: 7541 - protein, 9 aa, Artificial
  helical interface sequence
PDVTGRLLS

SEQ ID NO: 7542 - protein, 20 aa, Artificial
  helical interface sequence
VNYFLDGERQLGTRLMELRN

SEQ ID NO: 7543 - protein, 20 aa, Artificial
  helical interface sequence
VNYFLDGERQLGTRLMELRN

SEQ ID NO: 7544 - protein, 12 aa, Artificial
  helical interface sequence
FQVEYAVKAVEN

SEQ ID NO: 7545 - protein, 13 aa, Artificial
  helical interface sequence
ADAFTLFELFERK

SEQ ID NO: 7546 - protein, 7 aa, Artificial
  helical interface sequence
PWTNRYF

SEQ ID NO: 7547 - protein, 12 aa, Artificial
  helical interface sequence
PLTEAVSVADSQ

SEQ ID NO: 7548 - protein, 15 aa, Artificial
  helical interface sequence
QAPLQRRILEIGKKH

SEQ ID NO: 7549 - protein, 19 aa, Artificial
  helical interface sequence
AETQGAFQKFLAVVVSALG

SEQ ID NO: 7550 - protein, 16 aa, Artificial
  helical interface sequence
ALRSLSTALAGIRAGS

SEQ ID NO: 7551 - protein, 15 aa, Artificial
  helical interface sequence
ALRSLSTALAGIRAG

SEQ ID NO: 7552 - protein, 10 aa, Artificial
  helical interface sequence
AIPELTKLLN

SEQ ID NO: 7553 - protein, 12 aa, Artificial
  helical interface sequence
PITEAIAAADTQ

SEQ ID NO: 7554 - protein, 14 aa, Artificial
  helical interface sequence
TLIMQLLRDNLTLW

SEQ ID NO: 7555 - protein, 12 aa, Artificial
  helical interface sequence
LDGIVSYDRAET

SEQ ID NO: 7556 - protein, 16 aa, Artificial
  helical interface sequence
FLESVIRDSVTYTEHA

SEQ ID NO: 7557 - protein, 13 aa, Artificial
  helical interface sequence
RQTLEYQAQIAEQ

SEQ ID NO: 7558 - protein, 18 aa, Artificial
  helical interface sequence
PERVLLQLKYRYDVEIDN

SEQ ID NO: 7559 - protein, 12 aa, Artificial
  helical interface sequence
DQQLDCALDLMR

SEQ ID NO: 7560 - protein, 14 aa, Artificial
  helical interface sequence
SFGLYVHNDTMRAF

SEQ ID NO: 7561 - protein, 13 aa, Artificial
  helical interface sequence
FQVEYSLEAIKLG

SEQ ID NO: 7562 - protein, 13 aa, Artificial
  helical interface sequence
FQVEYSLEAIKLG

SEQ ID NO: 7563 - protein, 9 aa, Artificial
  helical interface sequence
GYSHKLHEQ

SEQ ID NO: 7564 - protein, 7 aa, Artificial
  helical interface sequence
ELEQIAD

SEQ ID NO: 7565 - protein, 14 aa, Artificial
  helical interface sequence
SDERALLDQLHTLL

SEQ ID NO: 7566 - protein, 16 aa, Artificial
  helical interface sequence
QDLRSHLVHKLVQAIF

SEQ ID NO: 7567 - protein, 10 aa, Artificial
  helical interface sequence
YERVLAFAQS

SEQ ID NO: 7568 - protein, 26 aa, Artificial
  helical interface sequence
VIVIINLITLAAALLHTKTWFELAPK

SEQ ID NO: 7569 - protein, 27 aa, Artificial
  helical interface sequence
EPVFWGLFGAGGMWSAIIAPVMILLVG

SEQ ID NO: 7570 - protein, 5 aa, Artificial
  helical interface sequence
EEFGR

SEQ ID NO: 7571 - protein, 12 aa, Artificial
  helical interface sequence
SREIQTAVRLLL

SEQ ID NO: 7572 - protein, 30 aa, Artificial
  helical interface sequence
KGRSYAYFMVGAMGLLSSAGAKSTVETFIS

SEQ ID NO: 7573 - protein, 14 aa, Artificial
  helical interface sequence
LGLYNEAVKIIHDF

SEQ ID NO: 7574 - protein, 16 aa, Artificial
  helical interface sequence
SLYTQLEMLVQGAERL

SEQ ID NO: 7575 - protein, 7 aa, Artificial
  helical interface sequence
EFKEAFS

SEQ ID NO: 7576 - protein, 13 aa, Artificial
  helical interface sequence
RIIHLQRRINMQL

SEQ ID NO: 7577 - protein, 16 aa, Artificial
  helical interface sequence
RSMKSVLEHLRAKMQR

SEQ ID NO: 7578 - protein, 6 aa, Artificial
  helical interface sequence
FIFQKM

SEQ ID NO: 7579 - protein, 15 aa, Artificial
  helical interface sequence
RLTIAFFALSGLDML

SEQ ID NO: 7580 - protein, 15 aa, Artificial
  helical interface sequence
RLTIAFFALSGLDML

SEQ ID NO: 7581 - protein, 14 aa, Artificial
  helical interface sequence
YTVWHFRRVLLRSL

SEQ ID NO: 7582 - protein, 14 aa, Artificial
  helical interface sequence
YHAWQHRQWVIQEF

SEQ ID NO: 7583 - protein, 11 aa, Artificial
  helical interface sequence
KDDIIEWIYSL

SEQ ID NO: 7584 - protein, 11 aa, Artificial
  helical interface sequence
KDDIIEWIYSL

SEQ ID NO: 7585 - protein, 14 aa, Artificial
  helical interface sequence
VNLKEKVAQLEAQC

SEQ ID NO: 7586 - protein, 7 aa, Artificial
  helical interface sequence
RFDRIAH

SEQ ID NO: 7587 - protein, 18 aa, Artificial
  helical interface sequence
REEIYQAFEAIYPVLSEF

SEQ ID NO: 7588 - protein, 13 aa, Artificial
  helical interface sequence
IDQVINSAAKTYY

SEQ ID NO: 7589 - protein, 7 aa, Artificial
  helical interface sequence
PLMQELF

SEQ ID NO: 7590 - protein, 24 aa, Artificial
  helical interface sequence
PEHDHRKRMGLKMLLMMGLLLPLV

SEQ ID NO: 7591 - protein, 30 aa, Artificial; identical to SEQ ID NO: 3329
  helical interface sequence

SEQ ID NO: 7592 - protein, 17 aa, Artificial
  helical interface sequence
IDEFTETTSKAIEVIGG

SEQ ID NO: 7593 - protein, 9 aa, Artificial
  helical interface sequence
QEYINNIHL

SEQ ID NO: 7594 - protein, 5 aa, Artificial
  helical interface sequence
PELIF

SEQ ID NO: 7595 - protein, 13 aa, Artificial
  helical interface sequence
GVDQLVEIIKVLG

SEQ ID NO: 7596 - protein, 15 aa, Artificial
  helical interface sequence
VERARFIINDWVKTH

SEQ ID NO: 7597 - protein, 34 aa, Artificial; identical to SEQ ID NO: 7153
  helical interface sequence

SEQ ID NO: 7598 - protein, 5 aa, Artificial
  helical interface sequence
SVWNY

SEQ ID NO: 7599 - protein, 12 aa, Artificial
  helical interface sequence
RPKLKTILTEFC

SEQ ID NO: 7600 - protein, 8 aa, Artificial
  helical interface sequence
PEEIRKTF

SEQ ID NO: 7601 - protein, 11 aa, Artificial
  helical interface sequence
RICLRELAHKG

SEQ ID NO: 7602 - protein, 9 aa, Artificial
  helical interface sequence
ADLQALKKF

SEQ ID NO: 7603 - protein, 17 aa, Artificial
  helical interface sequence
IYPRESNHVMRHLYRQH

SEQ ID NO: 7604 - protein, 19 aa, Artificial
  helical interface sequence
PSVHASLDKFLANVSTVLT

SEQ ID NO: 7605 - protein, 10 aa, Artificial
  helical interface sequence
FPEFLNLMAR

SEQ ID NO: 7606 - protein, 9 aa, Artificial
  helical interface sequence
FMDVYQRSY

SEQ ID NO: 7607 - protein, 14 aa, Artificial
  helical interface sequence
EAQAQEMYRYLAIA

SEQ ID NO: 7608 - protein, 14 aa, Artificial
  helical interface sequence
TDQLARQVDYLLNN

SEQ ID NO: 7609 - protein, 6 aa, Artificial
  helical interface sequence
VSILIP

SEQ ID NO: 7610 - protein, 6 aa, Artificial
  helical interface sequence
GVEKVT

SEQ ID NO: 7611 - protein, 7 aa, Artificial
  helical interface sequence
LEAIAEH

SEQ ID NO: 7612 - protein, 13 aa, Artificial
  helical interface sequence
ADESLESTRRMLQ

SEQ ID NO: 7613 - protein, 20 aa, Artificial
  helical interface sequence
ENLYDDRVFRIKRALDLSMR

SEQ ID NO: 7614 - protein, 13 aa, Artificial
  helical interface sequence
PKVAENLKSQLEG

SEQ ID NO: 7615 - protein, 9 aa, Artificial
  helical interface sequence
ALEKEVESM

SEQ ID NO: 7616 - protein, 8 aa, Artificial
  helical interface sequence
MHERLKGK

SEQ ID NO: 7617 - protein, 15 aa, Artificial
  helical interface sequence
YQVWHHRRVLVEWLR

SEQ ID NO: 7618 - protein, 15 aa, Artificial
  helical interface sequence
ENFVISSYYEYQFWG

SEQ ID NO: 7619 - protein, 11 aa, Artificial
  helical interface sequence
PWGWVSQIASG

SEQ ID NO: 7620 - protein, 10 aa, Artificial
  helical interface sequence
PIVVACFDAI

SEQ ID NO: 7621 - protein, 32 aa, Artificial
  helical interface sequence
QRLQTELDVSEQVQRDFVKLSQTLQVQLERIR

SEQ ID NO: 7622 - protein, 11 aa, Artificial
  helical interface sequence
VNLYQNYSELI

SEQ ID NO: 7623 - protein, 15 aa, Artificial
  helical interface sequence
AKNYGRAVYECLRGG

SEQ ID NO: 7624 - protein, 14 aa, Artificial
  helical interface sequence
AKNYGRAVYECLRG

SEQ ID NO: 7625 - protein, 5 aa, Artificial
  helical interface sequence
ELLNL

SEQ ID NO: 7626 - protein, 8 aa, Artificial
  helical interface sequence
PVVQALAA

SEQ ID NO: 7627 - protein, 6 aa, Artificial
  helical interface sequence
PTYKFF

SEQ ID NO: 7628 - protein, 38 aa, Artificial
  helical interface sequence
SEHEKLCRARDQCREILKYVNEAVKQTENRHRLEGYQK

SEQ ID NO: 7629 - protein, 13 aa, Artificial
  helical interface sequence
SEEEIREAFRVFD

SEQ ID NO: 7630 - protein, 20 aa, Artificial
  helical interface sequence
PLFNQILTLQQSIKQLKGQL

SEQ ID NO: 7631 - protein, 10 aa, Artificial
  helical interface sequence
EKELFESYIE

SEQ ID NO: 7632 - protein, 9 aa, Artificial
  helical interface sequence
AILYALLSS

SEQ ID NO: 7633 - protein, 32 aa, Artificial
  helical interface sequence
ATTIFAKLLSVLTELRTLGNMNSETCFSLKLK

SEQ ID NO: 7634 - protein, 16 aa, Artificial
  helical interface sequence
LSLALYVFDEYLQKTV

SEQ ID NO: 7635 - protein, 19 aa, Artificial
  helical interface sequence
ELAKHAVSEGTKAVTKYTS

SEQ ID NO: 7636 - protein, 6 aa, Artificial
  helical interface sequence
PSYWWN

SEQ ID NO: 7637 - protein, 16 aa, Artificial
  helical interface sequence
QKEIDRLNEVAKNLNE

SEQ ID NO: 7638 - protein, 6 aa, Artificial
  helical interface sequence
CEDIAR

SEQ ID NO: 7639 - protein, 12 aa, Artificial
  helical interface sequence
FKNLKRVAKELG

SEQ ID NO: 7640 - protein, 19 aa, Artificial
  helical interface sequence
PEAHVSLDKFLSGVALALA

SEQ ID NO: 7641 - protein, 24 aa, Artificial
  helical interface sequence
VRWVAVHTLAVPTIFFLGAIAAMQ

SEQ ID NO: 7642 - protein, 14 aa, Artificial
  helical interface sequence
QLKNQIRDARKACA

SEQ ID NO: 7643 - protein, 14 aa, Artificial
  helical interface sequence
QKEIDRLNEVAKNL

SEQ ID NO: 7644 - protein, 18 aa, Artificial
  helical interface sequence
EFLGTYNKLTETCFLDCV

SEQ ID NO: 7645 - protein, 17 aa, Artificial
  helical interface sequence
LQLVGTAAMLLASKFEE

SEQ ID NO: 7646 - protein, 21 aa, Artificial
  helical interface sequence
PYERANLLRFMMKAWKLVEKY

SEQ ID NO: 7647 - protein, 9 aa, Artificial
  helical interface sequence
AEERRRKQN

SEQ ID NO: 7648 - protein, 6 aa, Artificial
  helical interface sequence
AEELWG

SEQ ID NO: 7649 - protein, 12 aa, Artificial
  helical interface sequence
AELVDALQFVCG

SEQ ID NO: 7650 - protein, 6 aa, Artificial
  helical interface sequence
RDCLIG

SEQ ID NO: 7651 - protein, 9 aa, Artificial
  helical interface sequence
AEERRRKQN

SEQ ID NO: 7652 - protein, 10 aa, Artificial
  helical interface sequence
LWLAINLKQR

SEQ ID NO: 7653 - protein, 10 aa, Artificial
  helical interface sequence
PAARKLAREL

SEQ ID NO: 7654 - protein, 17 aa, Artificial
  helical interface sequence
PRDLISNINVIVLELKG

SEQ ID NO: 7655 - protein, 13 aa, Artificial
  helical interface sequence
IRSLIHHIGLALG

SEQ ID NO: 7656 - protein, 12 aa, Artificial
  helical interface sequence
MRQTLSEILKIH

SEQ ID NO: 7657 - protein, 10 aa, Artificial
  helical interface sequence
SNFYAQYKSI

SEQ ID NO: 7658 - protein, 10 aa, Artificial
  helical interface sequence
SNFYAQYKSI

SEQ ID NO: 7659 - protein, 12 aa, Artificial
  helical interface sequence
HKWAMIAVKEAT

SEQ ID NO: 7660 - protein, 8 aa, Artificial
  helical interface sequence
DEELDAMF

SEQ ID NO: 7661 - protein, 22 aa, Artificial
  helical interface sequence
KDLLEQRRAAVDTYCRHNYGVG

SEQ ID NO: 7662 - protein, 17 aa, Artificial
  helical interface sequence
DVVREAQAGMVEFTLLN

SEQ ID NO: 7663 - protein, 5 aa, Artificial
  helical interface sequence
LSCKL

SEQ ID NO: 7664 - protein, 28 aa, Artificial
  helical interface sequence
LMARKQAGFTAVMFLTVLSVLLYLTNKR

SEQ ID NO: 7665 - protein, 16 aa, Artificial
  helical interface sequence
VKFLAITTDCLQILAY

SEQ ID NO: 7666 - protein, 23 aa, Artificial
  helical interface sequence
FYLQSKVYRAAERLKWELAQREK

SEQ ID NO: 7667 - protein, 7 aa, Artificial
  helical interface sequence
LETRQMN

SEQ ID NO: 7668 - protein, 11 aa, Artificial
  helical interface sequence
PNFDALISKIY

SEQ ID NO: 7669 - protein, 14 aa, Artificial
  helical interface sequence
LSVYQKMKFNVAMG

SEQ ID NO: 7670 - protein, 18 aa, Artificial
  helical interface sequence
AEWEAKILELAGFLDSYI

SEQ ID NO: 7671 - protein, 65 aa, Artificial
  helical interface sequence
FEYTLANQMLTAMAQGYAAEISARRNAMDNASKNAGDMINRYSILYNRTRQAVITNELVDIITGA

SEQ ID NO: 7672 - protein, 5 aa, Artificial
  helical interface sequence
LRSKI

SEQ ID NO: 7673 - protein, 10 aa, Artificial
  helical interface sequence
NSLESCLKFA

SEQ ID NO: 7674 - protein, 6 aa, Artificial
  helical interface sequence
PVSLIA

SEQ ID NO: 7675 - protein, 8 aa, Artificial
  helical interface sequence
QVVVAYAA

SEQ ID NO: 7676 - protein, 20 aa, Artificial
  helical interface sequence
DTEVERAKSLLKLQLGQLYE

SEQ ID NO: 7677 - protein, 6 aa, Artificial
  helical interface sequence
YPRIEK

SEQ ID NO: 7678 - protein, 17 aa, Artificial
  helical interface sequence
VKRVLAVLHTERENMRA

SEQ ID NO: 7679 - protein, 5 aa, Artificial
  helical interface sequence
PLAQN

SEQ ID NO: 7680 - protein, 27 aa, Artificial
  helical interface sequence
PWHGFSIGFAYGCGLLFAAHGATILAV

SEQ ID NO: 7681 - protein, 16 aa, Artificial
  helical interface sequence
ESIKKEACWTISNITA

SEQ ID NO: 7682 - protein, 22 aa, Artificial
  helical interface sequence
MMGLLTNLADRELVHMINWAKR

SEQ ID NO: 7683 - protein, 12 aa, Artificial
  helical interface sequence
AWYCSQHHFREV

SEQ ID NO: 7684 - protein, 12 aa, Artificial
  helical interface sequence
VFYLHSRLLERA

SEQ ID NO: 7685 - protein, 15 aa, Artificial
  helical interface sequence
FQEYITFLGALAMIY

SEQ ID NO: 7686 - protein, 21 aa, Artificial
  helical interface sequence
AESKVFYLKMKGDYYRYLAEV

SEQ ID NO: 7687 - protein, 12 aa, Artificial
  helical interface sequence
DEEVDEMIREAD

SEQ ID NO: 7688 - protein, 24 aa, Artificial
  helical interface sequence
QMAAVKQALREAGDEFELRYRRAF

SEQ ID NO: 7689 - protein, 11 aa, Artificial
  helical interface sequence
RHQLELYVTKF

SEQ ID NO: 7690 - protein, 18 aa, Artificial
  helical interface sequence
PWILMSDDLSDLIHTNIY

SEQ ID NO: 7691 - protein, 7 aa, Artificial
  helical interface sequence
LAAAIAG

SEQ ID NO: 7692 - protein, 10 aa, Artificial
  helical interface sequence
DEILAHRLAL

SEQ ID NO: 7693 - protein, 22 aa, Artificial
  helical interface sequence
WGRIVTLISFGAFVAKHLKTIN

SEQ ID NO: 7694 - protein, 19 aa, Artificial
  helical interface sequence
KVTAMNCFLLELQVILHEY

SEQ ID NO: 7695 - protein, 15 aa, Artificial
  helical interface sequence
FSQVLDDLSARFILN

SEQ ID NO: 7696 - protein, 19 aa, Artificial
  helical interface sequence
AYPFLHLTTKLIMELAVNS

SEQ ID NO: 7697 - protein, 7 aa, Artificial
  helical interface sequence
RERFLKY

SEQ ID NO: 7698 - protein, 20 aa, Artificial
  helical interface sequence
PSLQVQLFIEILNRYIYFYE

SEQ ID NO: 7699 - protein, 6 aa, Artificial
  helical interface sequence
PWTQRH

SEQ ID NO: 7700 - protein, 26 aa, Artificial
  helical interface sequence
KEKDEMVEQEFNRLLEATSYLSHQLD

SEQ ID NO: 7701 - protein, 34 aa, Artificial; identical to SEQ ID NO: 5142
  helical interface sequence

SEQ ID NO: 7702 - protein, 10 aa, Artificial
  helical interface sequence
RLSRLLSYAG

SEQ ID NO: 7703 - protein, 7 aa, Artificial
  helical interface sequence
QEKLSRT

SEQ ID NO: 7704 - protein, 14 aa, Artificial
  helical interface sequence
PAEQDRLFRRVMDR

SEQ ID NO: 7705 - protein, 14 aa, Artificial
  helical interface sequence
ADYLRQLCDIWDLR

SEQ ID NO: 7706 - protein, 5 aa, Artificial
  helical interface sequence
FEDFQ

SEQ ID NO: 7707 - protein, 6 aa, Artificial
  helical interface sequence
HCINTM

SEQ ID NO: 7708 - protein, 14 aa, Artificial
  helical interface sequence
FATIIERSKKFING

SEQ ID NO: 7709 - protein, 5 aa, Artificial
  helical interface sequence
QYKSS

SEQ ID NO: 7710 - protein, 9 aa, Artificial
  helical interface sequence
MQDAVLNLV

SEQ ID NO: 7711 - protein, 11 aa, Artificial
  helical interface sequence
AFVTGEWGRAH

SEQ ID NO: 7712 - protein, 12 aa, Artificial
  helical interface sequence
AFTKAIVAADLR

SEQ ID NO: 7713 - protein, 12 aa, Artificial
  helical interface sequence
IDEAYKILKELG

SEQ ID NO: 7714 - protein, 13 aa, Artificial
  helical interface sequence
YAFKLLIQELMSM

SEQ ID NO: 7715 - protein, 11 aa, Artificial
  helical interface sequence
EMERDCLIGFG

SEQ ID NO: 7716 - protein, 19 aa, Artificial
  helical interface sequence
VEEVIKLVRDSFTSATERH

SEQ ID NO: 7717 - protein, 42 aa, Artificial; identical to SEQ ID NO: 2443
  helical interface sequence

SEQ ID NO: 7718 - protein, 6 aa, Artificial
  helical interface sequence
PLSASR

SEQ ID NO: 7719 - protein, 10 aa, Artificial
  helical interface sequence
GHILREMVHT

SEQ ID NO: 7720 - protein, 21 aa, Artificial
  helical interface sequence
PEVHVSMDKFLSLLSWSLSEK

SEQ ID NO: 7721 - protein, 8 aa, Artificial
  helical interface sequence
KILHRLLQ

SEQ ID NO: 7722 - protein, 22 aa, Artificial
  helical interface sequence
LKEFYILWTKIQKYQKIYREID

SEQ ID NO: 7723 - protein, 26 aa, Artificial
  helical interface sequence
SRSLHFFLAAWPVVGVWFTALGISTM

SEQ ID NO: 7724 - protein, 27 aa, Artificial
  helical interface sequence
QLGLIATALFVLVPSVFLIILYVQTES

SEQ ID NO: 7725 - protein, 7 aa, Artificial
  helical interface sequence
SEQLTSG

SEQ ID NO: 7726 - protein, 6 aa, Artificial
  helical interface sequence
IDRIYA

SEQ ID NO: 7727 - protein, 30 aa, Artificial
  helical interface sequence
RTRSQQEYQQALWYSASAESLALSALSLSL

SEQ ID NO: 7728 - protein, 5 aa, Artificial
  helical interface sequence
DEDWL

SEQ ID NO: 7729 - protein, 23 aa, Artificial
  helical interface sequence
AGDFETKLSDYGHNIGIRLLELL

SEQ ID NO: 7730 - protein, 35 aa, Artificial; identical to SEQ ID NO: 651
  helical interface sequence

SEQ ID NO: 7731 - protein, 7 aa, Artificial
  helical interface sequence
WKHIKHK

SEQ ID NO: 7732 - protein, 11 aa, Artificial
  helical interface sequence
SFRITRGIEAV

SEQ ID NO: 7733 - protein, 23 aa, Artificial
  helical interface sequence
TEELFDFLHARDHCVAHKLFNKL

SEQ ID NO: 7734 - protein, 22 aa, Artificial
  helical interface sequence
WGRIVTLISFGAFVAKHLKTIN

SEQ ID NO: 7735 - protein, 9 aa, Artificial
  helical interface sequence
PGELDRIKN

SEQ ID NO: 7736 - protein, 17 aa, Artificial
  helical interface sequence
SHVLSKVCMYFTYKVRY

SEQ ID NO: 7737 - protein, 16 aa, Artificial
  helical interface sequence
AGDLGGEALERLFITY

SEQ ID NO: 7738 - protein, 26 aa, Artificial
  helical interface sequence
KAFAKRQQQLTAMKVIQRNCAAYLKL

SEQ ID NO: 7739 - protein, 28 aa, Artificial
  helical interface sequence
EWAGKLHFWMMFVGANLTFFPQHFLGRQ

SEQ ID NO: 7740 - protein, 26 aa, Artificial
  helical interface sequence
RFKILRSLQAFVAVAARVFAHGAATL

SEQ ID NO: 7741 - protein, 25 aa, Artificial
  helical interface sequence
SAVLVDVSKIITLTQEFRRHYDSVY

SEQ ID NO: 7742 - protein, 13 aa, Artificial
  helical interface sequence
WKRDLSKLFTSLF

SEQ ID NO: 7743 - protein, 16 aa, Artificial
  helical interface sequence
PMVRRAAASKLGEFAK

SEQ ID NO: 7744 - protein, 16 aa, Artificial
  helical interface sequence
GESLLGTQLLVDVVTG

SEQ ID NO: 7745 - protein, 24 aa, Artificial
  helical interface sequence
AAEYYRAYLEGECVEWLHRYLKNG

SEQ ID NO: 7746 - protein, 28 aa, Artificial
  helical interface sequence
EQCERARRLQAKMMTNLVMAKDRLQLLE

SEQ ID NO: 7747 - protein, 7 aa, Artificial
  helical interface sequence
EKELLDS

SEQ ID NO: 7748 - protein, 11 aa, Artificial
  helical interface sequence
IVRTLHQHKLG

SEQ ID NO: 7749 - protein, 19 aa, Artificial
  helical interface sequence
APSLRVTATAARTISVLTG

SEQ ID NO: 7750 - protein, 17 aa, Artificial
  helical interface sequence
FCTPGIVMSMYTLLRNQ

SEQ ID NO: 7751 - protein, 15 aa, Artificial
  helical interface sequence
IDQVINSAAKTYYMS

SEQ ID NO: 7752 - protein, 14 aa, Artificial
  helical interface sequence
EMGFAGIAVGAAMA

SEQ ID NO: 7753 - protein, 13 aa, Artificial
  helical interface sequence
AYQSFEQVVNELF

SEQ ID NO: 7754 - protein, 16 aa, Artificial
  helical interface sequence
IQDLRRRFFLHHLIAE

SEQ ID NO: 7755 - protein, 14 aa, Artificial
  helical interface sequence
RSTVAQLVQTLEQH

SEQ ID NO: 7756 - protein, 29 aa, Artificial
  helical interface sequence
MINRYSILYNRTRQAVITNELVDIITGAS

SEQ ID NO: 7757 - protein, 12 aa, Artificial
  helical interface sequence
PGTVLDWCSKLK

SEQ ID NO: 7758 - protein, 6 aa, Artificial
  helical interface sequence
PWTQRF

SEQ ID NO: 7759 - protein, 8 aa, Artificial
  helical interface sequence
FTQILSTV

SEQ ID NO: 7760 - protein, 18 aa, Artificial
  helical interface sequence
DEQKETILKALNDAIEKG

SEQ ID NO: 7761 - protein, 15 aa, Artificial
  helical interface sequence
DQRVLQSLLRLEERY

SEQ ID NO: 7762 - protein, 6 aa, Artificial
  helical interface sequence
ELMASL

SEQ ID NO: 7763 - protein, 11 aa, Artificial
  helical interface sequence
REWVLKIAKLA

SEQ ID NO: 7764 - protein, 11 aa, Artificial
  helical interface sequence
REWVLKIAKLA

SEQ ID NO: 7765 - protein, 19 aa, Artificial
  helical interface sequence
QTEFCVLMVRLSPEMMEDA

SEQ ID NO: 7766 - protein, 12 aa, Artificial
  helical interface sequence
IRHILLIADVMT

SEQ ID NO: 7767 - protein, 10 aa, Artificial
  helical interface sequence
VNRCIEALDE

SEQ ID NO: 7768 - protein, 10 aa, Artificial
  helical interface sequence
VSAHTSHLVG

SEQ ID NO: 7769 - protein, 14 aa, Artificial
  helical interface sequence
RELVRAQIAICGMS

SEQ ID NO: 7770 - protein, 13 aa, Artificial
  helical interface sequence
PGELDRIKSFVSS

SEQ ID NO: 7771 - protein, 13 aa, Artificial
  helical interface sequence
AITAVINSSDVQG

SEQ ID NO: 7772 - protein, 10 aa, Artificial
  helical interface sequence
VHAYLAEFDD

SEQ ID NO: 7773 - protein, 9 aa, Artificial
  helical interface sequence
WKHIKHKYE

SEQ ID NO: 7774 - protein, 16 aa, Artificial
  helical interface sequence
TWFDTMLGFAISAYAL

SEQ ID NO: 7775 - protein, 8 aa, Artificial
  helical interface sequence
VQMRRKLE

SEQ ID NO: 7776 - protein, 6 aa, Artificial
  helical interface sequence
VENFLG

SEQ ID NO: 7777 - protein, 15 aa, Artificial
  helical interface sequence
YQVWHHRRVLVEWLK

SEQ ID NO: 7778 - protein, 15 aa, Artificial
  helical interface sequence
VSELAELVKKLEDKF

SEQ ID NO: 7779 - protein, 18 aa, Artificial
  helical interface sequence
YERYNSQLLSFVRDLNQY

SEQ ID NO: 7780 - protein, 19 aa, Artificial
  helical interface sequence
PSSFENVKEKWVPEITHHC

SEQ ID NO: 7781 - protein, 24 aa, Artificial
  helical interface sequence
AYVEELTWDLARKAWGHIQEVEKV

SEQ ID NO: 7782 - protein, 11 aa, Artificial
  helical interface sequence
PYFRSYFAAIN

SEQ ID NO: 7783 - protein, 28 aa, Artificial
  helical interface sequence
MWPLYLVLLFAVELHGSVGLYRLAVKWG

SEQ ID NO: 7784 - protein, 15 aa, Artificial
  helical interface sequence
KDQWEERIQVWHEEH

SEQ ID NO: 7785 - protein, 10 aa, Artificial
  helical interface sequence
TKQRIDEFES

SEQ ID NO: 7786 - protein, 8 aa, Artificial
  helical interface sequence
RQAYADMF

SEQ ID NO: 7787 - protein, 5 aa, Artificial
  helical interface sequence
MEAYR

SEQ ID NO: 7788 - protein, 13 aa, Artificial
  helical interface sequence
KSSLLDAILVGLY

SEQ ID NO: 7789 - protein, 12 aa, Artificial
  helical interface sequence
PLTEAIAAADSQ

SEQ ID NO: 7790 - protein, 27 aa, Artificial
  helical interface sequence
VDYWIWSLQLSGIGTTLTGINFFVTIL

SEQ ID NO: 7791 - protein, 9 aa, Artificial
  helical interface sequence
LIHFLREEL

SEQ ID NO: 7792 - protein, 7 aa, Artificial
  helical interface sequence
PWTQRFF

SEQ ID NO: 7793 - protein, 14 aa, Artificial
  helical interface sequence
INETQKALEELSRA

SEQ ID NO: 7794 - protein, 7 aa, Artificial
  helical interface sequence
EYEALTV

SEQ ID NO: 7795 - protein, 23 aa, Artificial
  helical interface sequence
TADAEILINTARIHAQNYLKTYN

SEQ ID NO: 7796 - protein, 12 aa, Artificial
  helical interface sequence
FQVEYSLEAIKL

SEQ ID NO: 7797 - protein, 21 aa, Artificial
  helical interface sequence
AADGDALVKRFKNSVKWYHFD

SEQ ID NO: 7798 - protein, 12 aa, Artificial
  helical interface sequence
SDQLFGMCESLY

SEQ ID NO: 7799 - protein, 5 aa, Artificial
  helical interface sequence
HTWLH

SEQ ID NO: 7800 - protein, 47 aa, Artificial; identical to SEQ ID NO: 1689
  helical interface sequence

SEQ ID NO: 7801 - protein, 47 aa, Artificial; identical to SEQ ID NO: 1689
  helical interface sequence

SEQ ID NO: 7802 - protein, 30 aa, Artificial; identical to SEQ ID NO: 567
  helical interface sequence

SEQ ID NO: 7803 - protein, 19 aa, Artificial
  helical interface sequence
PDTHCAVDKLLSAICQELS

SEQ ID NO: 7804 - protein, 12 aa, Artificial
  helical interface sequence
AFTKVVSQADTR

SEQ ID NO: 7805 - protein, 11 aa, Artificial
  helical interface sequence
PAVRYALGDAF

SEQ ID NO: 7806 - protein, 9 aa, Artificial
  helical interface sequence
DRLRPLSYP

SEQ ID NO: 7807 - protein, 9 aa, Artificial
  helical interface sequence
RKIVMDFLG

SEQ ID NO: 7808 - protein, 12 aa, Artificial
  helical interface sequence
AELVDALQFVCG

SEQ ID NO: 7809 - protein, 7 aa, Artificial
  helical interface sequence
PWTQRFF

SEQ ID NO: 7810 - protein, 17 aa, Artificial
  helical interface sequence
FEEATAEAYRYADLLAK

SEQ ID NO: 7811 - protein, 16 aa, Artificial
  helical interface sequence
VADCGAEALARLLIVY

SEQ ID NO: 7812 - protein, 6 aa, Artificial
  helical interface sequence
EDARLR

SEQ ID NO: 7813 - protein, 29 aa, Artificial
  helical interface sequence
QKSMSILNSFVNDIFERIATEASKLAAYN

SEQ ID NO: 7814 - protein, 21 aa, Artificial
  helical interface sequence
NAPGAAANRVALEACTQARNE

SEQ ID NO: 7815 - protein, 12 aa, Artificial
  helical interface sequence
VQIEYALAAVAG

SEQ ID NO: 7816 - protein, 12 aa, Artificial
  helical interface sequence
FQVEYAQEAVKK

SEQ ID NO: 7817 - protein, 12 aa, Artificial
  helical interface sequence
VQIEYALAAVAG

SEQ ID NO: 7818 - protein, 33 aa, Artificial
  helical interface sequence
EENLYQKIFASHFGHLAIIFLWVSGSLFHVAWQ

SEQ ID NO: 7819 - protein, 5 aa, Artificial
  helical interface sequence
EEALK

SEQ ID NO: 7820 - protein, 30 aa, Artificial
  helical interface sequence
AGDAAVVMTSAQITMGMPYAVTDAVLAPHI

SEQ ID NO: 7821 - protein, 9 aa, Artificial
  helical interface sequence
MTYWRVLGA

SEQ ID NO: 7822 - protein, 29 aa, Artificial
  helical interface sequence
SKAMSIMNSFVNDVFERIAGEASRLAHYN

SEQ ID NO: 7823 - protein, 11 aa, Artificial
  helical interface sequence
AMDVFVCTYFM

SEQ ID NO: 7824 - protein, 32 aa, Artificial; identical to SEQ ID NO: 3730
  helical interface sequence

SEQ ID NO: 7825 - protein, 24 aa, Artificial
  helical interface sequence
NMGSLLGLCLVIQIVTGIFMAMHY

SEQ ID NO: 7826 - protein, 34 aa, Artificial; identical to SEQ ID NO: 1043
  helical interface sequence

SEQ ID NO: 7827 - protein, 9 aa, Artificial
  helical interface sequence
KILHRLLQD

SEQ ID NO: 7828 - protein, 15 aa, Artificial
  helical interface sequence
AREDDMENNMKEVSS

SEQ ID NO: 7829 - protein, 13 aa, Artificial
  helical interface sequence
TSDLQSVQGNIQR

SEQ ID NO: 7830 - protein, 16 aa, Artificial
  helical interface sequence
MVEKRMLMKFLTFCVE

SEQ ID NO: 7831 - protein, 13 aa, Artificial
  helical interface sequence
RIIHLQRRINMQL

SEQ ID NO: 7832 - protein, 6 aa, Artificial
  helical interface sequence
IACWIH

SEQ ID NO: 7833 - protein, 16 aa, Artificial
  helical interface sequence
EGYDNIQKHLTQASSI

SEQ ID NO: 7834 - protein, 15 aa, Artificial
  helical interface sequence
IVETINILKPGLEGA

SEQ ID NO: 7835 - protein, 19 aa, Artificial
  helical interface sequence
IEQLTQKSKKIIEEIIRYE

SEQ ID NO: 7836 - protein, 11 aa, Artificial
  helical interface sequence
LDDQVILLRAG

SEQ ID NO: 7837 - protein, 23 aa, Artificial
  helical interface sequence
AEYRTKMAGVMLRRAVERAKARA

SEQ ID NO: 7838 - protein, 9 aa, Artificial
  helical interface sequence
RDWAESTLM

SEQ ID NO: 7839 - protein, 12 aa, Artificial
  helical interface sequence
YGWGIAKELSKR

SEQ ID NO: 7840 - protein, 12 aa, Artificial
  helical interface sequence
VKDIIFAIKKTL

SEQ ID NO: 7841 - protein, 22 aa, Artificial
  helical interface sequence
HHNALERKRRDHIKDSFHSLRD

SEQ ID NO: 7842 - protein, 12 aa, Artificial
  helical interface sequence
IFDIEEELKAQL

SEQ ID NO: 7843 - protein, 25 aa, Artificial
  helical interface sequence
PKEQAIGLSVTFLSFLLPAGWVLYH

SEQ ID NO: 7844 - protein, 33 aa, Artificial
  helical interface sequence
VYGSTFFVATGFHGLHVIIGSTFLIVCFFRQLK

SEQ ID NO: 7845 - protein, 25 aa, Artificial
  helical interface sequence
PKEQAIGLSVTFLSFLLPAGWVLYH

SEQ ID NO: 7846 - protein, 5 aa, Artificial
  helical interface sequence
SVWNY

SEQ ID NO: 7847 - protein, 9 aa, Artificial
  helical interface sequence
KILHRLLQE

SEQ ID NO: 7848 - protein, 22 aa, Artificial
  helical interface sequence
VGDAQVLVRYMKAELELYRLQR

SEQ ID NO: 7849 - protein, 15 aa, Artificial
  helical interface sequence
NVRFVGFEINEYLHK

SEQ ID NO: 7850 - protein, 28 aa, Artificial
  helical interface sequence
GLWQIITICATGAFVSWALREVEICRKL

SEQ ID NO: 7851 - protein, 17 aa, Artificial
  helical interface sequence
KCVSIQYLEAVRRLKVE

SEQ ID NO: 7852 - protein, 19 aa, Artificial
  helical interface sequence
PDVQAAFQKVVAGVANALA

SEQ ID NO: 7853 - protein, 10 aa, Artificial
  helical interface sequence
FADYMEAFKT

SEQ ID NO: 7854 - protein, 30 aa, Artificial
  helical interface sequence
PRCAVIFGKILGILTEIRTLGMQNSNMCIS

SEQ ID NO: 7855 - protein, 7 aa, Artificial
  helical interface sequence
VKKFLER

SEQ ID NO: 7856 - protein, 6 aa, Artificial
  helical interface sequence
GVEKVT

SEQ ID NO: 7857 - protein, 22 aa, Artificial
  helical interface sequence
PLAVEGQTQGGVWMGMGQALSE

SEQ ID NO: 7858 - protein, 27 aa, Artificial
  helical interface sequence
TEELFKTLDKINFSYILSLEEVFRDFA

SEQ ID NO: 7859 - protein, 14 aa, Artificial
  helical interface sequence
LPLVKAIATNIKKH

SEQ ID NO: 7860 - protein, 18 aa, Artificial
  helical interface sequence
IRDLISYGVIGLIKAVDN

SEQ ID NO: 7861 - protein, 10 aa, Artificial
  helical interface sequence
YEELREQLSS

SEQ ID NO: 7862 - protein, 20 aa, Artificial
  helical interface sequence
VARKQQLIRDVIDVTNKSIG

SEQ ID NO: 7863 - protein, 20 aa, Artificial
  helical interface sequence
VARKQQLIRDVIDVTNKSIG

SEQ ID NO: 7864 - protein, 26 aa, Artificial
  helical interface sequence
QLGLIATALFVLVPSVFLIILYVQTE

SEQ ID NO: 7865 - protein, 6 aa, Artificial
  helical interface sequence
GVEKVT

SEQ ID NO: 7866 - protein, 12 aa, Artificial
  helical interface sequence
LTARLYSLLFRR

SEQ ID NO: 7867 - protein, 18 aa, Artificial
  helical interface sequence
ASSRWLEGIRKWYYNAAG

SEQ ID NO: 7868 - protein, 18 aa, Artificial
  helical interface sequence
ASSRWLEGIRKWYYNAAG

SEQ ID NO: 7869 - protein, 10 aa, Artificial
  helical interface sequence
PERIFRSIQE

SEQ ID NO: 7870 - protein, 16 aa, Artificial
  helical interface sequence
EGVATYAAAVLFRMSE

SEQ ID NO: 7871 - protein, 30 aa, Artificial
  helical interface sequence
FEYTSKLQRMFQDIGVSKDLNEQFKKHLTN

SEQ ID NO: 7872 - protein, 17 aa, Artificial
  helical interface sequence
VFEQDDGENWVEIQQVL

SEQ ID NO: 7873 - protein, 14 aa, Artificial
  helical interface sequence
AKNYGRAVYECLRG

SEQ ID NO: 7874 - protein, 21 aa, Artificial
  helical interface sequence
NAPGAAANRVALEACTQARNE

SEQ ID NO: 7875 - protein, 32 aa, Artificial; identical to SEQ ID NO: 1080
  helical interface sequence

SEQ ID NO: 7876 - protein, 33 aa, Artificial
  helical interface sequence
LFVWSVMITAVLLLLSLPVLAAGITMLLTDRNL

SEQ ID NO: 7877 - protein, 25 aa, Artificial
  helical interface sequence
PKEQAIGLSVTFLSFLLPAGWVLYH

SEQ ID NO: 7878 - protein, 34 aa, Artificial; identical to SEQ ID NO: 7153
  helical interface sequence

SEQ ID NO: 7879 - protein, 13 aa, Artificial
  helical interface sequence
LKERCLQVVRSLV

SEQ ID NO: 7880 - protein, 18 aa, Artificial
  helical interface sequence
SHVLSKVCMYFTYKVRYT

SEQ ID NO: 7881 - protein, 18 aa, Artificial
  helical interface sequence
SHVLSKVCMYFTYKVRYT

SEQ ID NO: 7882 - protein, 15 aa, Artificial
  helical interface sequence
QGELPQCFCRMCAVF

SEQ ID NO: 7883 - protein, 5 aa, Artificial
  helical interface sequence
LEDLF

SEQ ID NO: 7884 - protein, 25 aa, Artificial
  helical interface sequence
PEGLREVALKSVEMAHKLHALLLEV

SEQ ID NO: 7885 - protein, 12 aa, Artificial
  helical interface sequence
KKLKESYCQRQG

SEQ ID NO: 7886 - protein, 10 aa, Artificial
  helical interface sequence
YEEFVQMMTA

SEQ ID NO: 7887 - protein, 15 aa, Artificial
  helical interface sequence
PGFTALIKTLRKCKI

SEQ ID NO: 7888 - protein, 6 aa, Artificial
  helical interface sequence
TLDYVV

SEQ ID NO: 7889 - protein, 6 aa, Artificial
  helical interface sequence
TLDYVV

SEQ ID NO: 7890 - protein, 23 aa, Artificial
  helical interface sequence
LYAKLLGLLAELRSINEAYGYQI

SEQ ID NO: 7891 - protein, 19 aa, Artificial
  helical interface sequence
QTQLRQAVQLLTRTELTLK

SEQ ID NO: 7892 - protein, 14 aa, Artificial
  helical interface sequence
GIGCELLKNLVLTG

SEQ ID NO: 7893 - protein, 49 aa, Artificial; identical to SEQ ID NO: 4457
  helical interface sequence

SEQ ID NO: 7894 - protein, 18 aa, Artificial
  helical interface sequence
PLLQGRLFSYTDTQISRL

SEQ ID NO: 7895 - protein, 17 aa, Artificial
  helical interface sequence
PFEQRHIVDGFSFELSK

SEQ ID NO: 7896 - protein, 13 aa, Artificial
  helical interface sequence
PYIRERVVDQLAH

SEQ ID NO: 7897 - protein, 20 aa, Artificial
  helical interface sequence
PEFQGHVVRVMGGLDILINA

SEQ ID NO: 7898 - protein, 18 aa, Artificial
  helical interface sequence
GRRIAIAQAVFKDLFANV

SEQ ID NO: 7899 - protein, 10 aa, Artificial
  helical interface sequence
SNFYAQYKSI

SEQ ID NO: 7900 - protein, 10 aa, Artificial
  helical interface sequence
ADAMLRALLG

SEQ ID NO: 7901 - protein, 13 aa, Artificial
  helical interface sequence
FQVEYALEAVKRG

SEQ ID NO: 7902 - protein, 12 aa, Artificial
  helical interface sequence
QTFAYGVLDSNY

SEQ ID NO: 7903 - protein, 11 aa, Artificial
  helical interface sequence
AMDVVYALKRQ

SEQ ID NO: 7904 - protein, 29 aa, Artificial
  helical interface sequence
SKAMSIMNSFVNDVFERIAGEASRLAHYN

SEQ ID NO: 7905 - protein, 13 aa, Artificial
  helical interface sequence
AVDTYCRHNYGVG

SEQ ID NO: 7906 - protein, 11 aa, Artificial
  helical interface sequence
TVALREIRRYQ

SEQ ID NO: 7907 - protein, 12 aa, Artificial
  helical interface sequence
PQLMAAFIKQRT

SEQ ID NO: 7908 - protein, 17 aa, Artificial
  helical interface sequence
QKEIDRLNEVAKNLNES

SEQ ID NO: 7909 - protein, 22 aa, Artificial
  helical interface sequence
RTIESILEPVAQQISHLVIMHE

SEQ ID NO: 7910 - protein, 6 aa, Artificial
  helical interface sequence
QDFLLK

SEQ ID NO: 7911 - protein, 18 aa, Artificial
  helical interface sequence
ITVARPYAKAAFDFAVEH

SEQ ID NO: 7912 - protein, 23 aa, Artificial
  helical interface sequence
QLQVERLQHTYVEALHAYVSINH

SEQ ID NO: 7913 - protein, 12 aa, Artificial
  helical interface sequence
DALNNIINNARD

SEQ ID NO: 7914 - protein, 18 aa, Artificial
  helical interface sequence
TTEAFEKMVSLLSVLLSM

SEQ ID NO: 7915 - protein, 16 aa, Artificial
  helical interface sequence
ANECWIQMMRVLQQKL

SEQ ID NO: 7916 - protein, 14 aa, Artificial
  helical interface sequence
VDIKRDYVLSKLRD

SEQ ID NO: 7917 - protein, 16 aa, Artificial
  helical interface sequence
ISKAVDVYNSLKDRLG

SEQ ID NO: 7918 - protein, 17 aa, Artificial
  helical interface sequence
ANVMEILGIAINRYNGL

SEQ ID NO: 7919 - protein, 25 aa, Artificial
  helical interface sequence
NRRMAACLRDMEIVLRYVSYAEIAG

SEQ ID NO: 7920 - protein, 17 aa, Artificial
  helical interface sequence
PAEVILATVYEALKEAL

SEQ ID NO: 7921 - protein, 16 aa, Artificial
  helical interface sequence
QQASSAFQFAQALIAD

SEQ ID NO: 7922 - protein, 14 aa, Artificial
  helical interface sequence
ATATQVGVDILKEG

SEQ ID NO: 7923 - protein, 6 aa, Artificial
  helical interface sequence
RDCLIG

SEQ ID NO: 7924 - protein, 8 aa, Artificial
  helical interface sequence
KRAVDWAM

SEQ ID NO: 7925 - protein, 83 aa, Artificial; identical to SEQ ID NO: 106
  helical interface sequence

SEQ ID NO: 7926 - protein, 15 aa, Artificial
  helical interface sequence
VTEAYASVQYIMNEV

SEQ ID NO: 7927 - protein, 8 aa, Artificial
  helical interface sequence
EQLVIEFY

SEQ ID NO: 7928 - protein, 8 aa, Artificial
  helical interface sequence
MHEWLQEG

SEQ ID NO: 7929 - protein, 37 aa, Artificial; identical to SEQ ID NO: 935
  helical interface sequence

SEQ ID NO: 7930 - protein, 10 aa, Artificial
  helical interface sequence
EGWRTVFSAD

SEQ ID NO: 7931 - protein, 10 aa, Artificial
  helical interface sequence
ASNAITRLER

SEQ ID NO: 7932 - protein, 7 aa, Artificial
  helical interface sequence
EELNKLL

SEQ ID NO: 7933 - protein, 14 aa, Artificial
  helical interface sequence
AKEEMARFWEKNTK

SEQ ID NO: 7934 - protein, 23 aa, Artificial
  helical interface sequence
AAVAVEFARLYAVELEHYEKLEG

SEQ ID NO: 7935 - protein, 23 aa, Artificial
  helical interface sequence
AAVAVEFARLYAVELEHYEKLEG

SEQ ID NO: 7936 - protein, 8 aa, Artificial
  helical interface sequence
YEELKHLL

SEQ ID NO: 7937 - protein, 22 aa, Artificial
  helical interface sequence
RPEMIANQRAVTAHLFNRYTED

SEQ ID NO: 7938 - protein, 9 aa, Artificial
  helical interface sequence
GCSESVLRT

SEQ ID NO: 7939 - protein, 13 aa, Artificial
  helical interface sequence
DFYKTKYIWERLG

SEQ ID NO: 7940 - protein, 28 aa, Artificial
  helical interface sequence
LMARKQAGFTAVMFLTVLSVLLYLTNKR

SEQ ID NO: 7941 - protein, 7 aa, Artificial
  helical interface sequence
RKDIQTL

SEQ ID NO: 7942 - protein, 17 aa, Artificial
  helical interface sequence
DSVLFYAITTLHNLLLH

SEQ ID NO: 7943 - protein, 15 aa, Artificial
  helical interface sequence
LSKQAVAYRQLSLLL

SEQ ID NO: 7944 - protein, 14 aa, Artificial
  helical interface sequence
RSTVAQLVQTLEQH

SEQ ID NO: 7945 - protein, 16 aa, Artificial
  helical interface sequence
QASDSAYQFAKAALEK

SEQ ID NO: 7946 - protein, 16 aa, Artificial
  helical interface sequence
QASDSAYQFAKAALEK

SEQ ID NO: 7947 - protein, 16 aa, Artificial
  helical interface sequence
QASDSAYQFAKAALEK

SEQ ID NO: 7948 - protein, 9 aa, Artificial
  helical interface sequence
IDTILSSKL

SEQ ID NO: 7949 - protein, 6 aa, Artificial
  helical interface sequence
YNVALE

SEQ ID NO: 7950 - protein, 7 aa, Artificial
  helical interface sequence
EAEISHT

SEQ ID NO: 7951 - protein, 30 aa, Artificial; identical to SEQ ID NO: 1386
  helical interface sequence

SEQ ID NO: 7952 - protein, 16 aa, Artificial
  helical interface sequence
ESIKKEACWTISNITA

SEQ ID NO: 7953 - protein, 18 aa, Artificial
  helical interface sequence
ENAIELARVVDRSLRDSK

SEQ ID NO: 7954 - protein, 15 aa, Artificial
  helical interface sequence
KHQIRQMEMKILRAL

SEQ ID NO: 7955 - protein, 7 aa, Artificial
  helical interface sequence
PAVFLRD

SEQ ID NO: 7956 - protein, 70 aa, Artificial
  helical interface sequence
NYQEYSLANIIYYSLKESTTSEQSARMTAMDNASKNASEMIDKLTLTFNRTRQAVITKELIEIISGAAAL

SEQ ID NO: 7957 - protein, 11 aa, Artificial
  helical interface sequence
ETAFQGMLRKL

SEQ ID NO: 7958 - protein, 9 aa, Artificial
  helical interface sequence
EQEFLRIMK

SEQ ID NO: 7959 - protein, 19 aa, Artificial
  helical interface sequence
WRVRLAIIEYMPLLAGQLG

SEQ ID NO: 7960 - protein, 19 aa, Artificial
  helical interface sequence
WRVRLAIIEYMPLLAGQLG

SEQ ID NO: 7961 - protein, 52 aa, Artificial; identical to SEQ ID NO: 1260
  helical interface sequence

SEQ ID NO: 7962 - protein, 15 aa, Artificial
  helical interface sequence
LLGACSGAIAGLVGV

SEQ ID NO: 7963 - protein, 21 aa, Artificial
  helical interface sequence
ASTNAVIAAVCATEVFKIATS

SEQ ID NO: 7964 - protein, 15 aa, Artificial
  helical interface sequence
KRELQVLYRGFKNEC

SEQ ID NO: 7965 - protein, 34 aa, Artificial
  helical interface sequence
VEERNLLSVAYKNVIGARRASWRIISSIEQKEES

SEQ ID NO: 7966 - protein, 9 aa, Artificial
  helical interface sequence
DLLLEMLDA

SEQ ID NO: 7967 - protein, 29 aa, Artificial
  helical interface sequence
PEYWERITQVAKGQEQWFRVNLRTLLGYY

SEQ ID NO: 7968 - protein, 18 aa, Artificial
  helical interface sequence
NQHLCGSHLVEALYLVCG

SEQ ID NO: 7969 - protein, 5 aa, Artificial
  helical interface sequence
ADQEK

SEQ ID NO: 7970 - protein, 24 aa, Artificial
  helical interface sequence
QMAAVKQALREAGDEFELRYRRAF

SEQ ID NO: 7971 - protein, 28 aa, Artificial
  helical interface sequence
SKDKEVIETLSEIYSIVITLDHVEKAYL

SEQ ID NO: 7972 - protein, 10 aa, Artificial
  helical interface sequence
WRVRYMVADK

SEQ ID NO: 7973 - protein, 6 aa, Artificial
  helical interface sequence
INEVIH

SEQ ID NO: 7974 - protein, 21 aa, Artificial
  helical interface sequence
KEFADNLDSDFKVRQYLTKEL

SEQ ID NO: 7975 - protein, 8 aa, Artificial
  helical interface sequence
FMDVYQRS

SEQ ID NO: 7976 - protein, 10 aa, Artificial
  helical interface sequence
PQLREHIMAN

SEQ ID NO: 7977 - protein, 11 aa, Artificial
  helical interface sequence
MSERMKIVDVI

SEQ ID NO: 7978 - protein, 16 aa, Artificial
  helical interface sequence
GGEYGAEAVERMFLGF

SEQ ID NO: 7979 - protein, 9 aa, Artificial
  helical interface sequence
RPDAEYWNS

SEQ ID NO: 7980 - protein, 12 aa, Artificial
  helical interface sequence
AFTKVAAQADTR

SEQ ID NO: 7981 - protein, 12 aa, Artificial
  helical interface sequence
PLTDAVSTADSQ

SEQ ID NO: 7982 - protein, 12 aa, Artificial
  helical interface sequence
PLTDAVSTADSQ

SEQ ID NO: 7983 - protein, 25 aa, Artificial
  helical interface sequence
KEKDEMVEQEFNRLLEATSYLSHQL

SEQ ID NO: 7984 - protein, 14 aa, Artificial
  helical interface sequence
SRMWDSMIEYEFMV

SEQ ID NO: 7985 - protein, 7 aa, Artificial
  helical interface sequence
PPCILNN

SEQ ID NO: 7986 - protein, 17 aa, Artificial
  helical interface sequence
VEGDATALYLQRLLEPL

SEQ ID NO: 7987 - protein, 75 aa, Artificial; identical to SEQ ID NO: 2772
  helical interface sequence

SEQ ID NO: 7988 - protein, 14 aa, Artificial
  helical interface sequence
KEFLLYLAGFVDGD

SEQ ID NO: 7989 - protein, 20 aa, Artificial
  helical interface sequence
EGFLPFSNLVTHLDSFLPIC

SEQ ID NO: 7990 - protein, 16 aa, Artificial
  helical interface sequence
TNLRYLALESMCTLAS

SEQ ID NO: 7991 - protein, 12 aa, Artificial
  helical interface sequence
LGSLCTLFQKLY

SEQ ID NO: 7992 - protein, 9 aa, Artificial
  helical interface sequence
MQDAVLNLV

SEQ ID NO: 7993 - protein, 27 aa, Artificial
  helical interface sequence
NTELQAANGRFQRATASMEAARALTSN

SEQ ID NO: 7994 - protein, 13 aa, Artificial
  helical interface sequence
TEMANKAAEAVLK

SEQ ID NO: 7995 - protein, 17 aa, Artificial
  helical interface sequence
PLAHVHLATEYATRTTN

SEQ ID NO: 7996 - protein, 9 aa, Artificial
  helical interface sequence
RDWAESTLM

SEQ ID NO: 7997 - protein, 8 aa, Artificial
  helical interface sequence
HLLDAAAR

SEQ ID NO: 7998 - protein, 12 aa, Artificial
  helical interface sequence
MRHILLVADVMT

SEQ ID NO: 7999 - protein, 13 aa, Artificial
  helical interface sequence
AEQIADAVIFLVS

SEQ ID NO: 8000 - protein, 13 aa, Artificial
  helical interface sequence
AEQIADAVIFLVS

SEQ ID NO: 8001 - protein, 20 aa, Artificial
  helical interface sequence
ASIHDTVENLIILANNSLSS

SEQ ID NO: 8002 - protein, 6 aa, Artificial
  helical interface sequence
PDEYEQ

SEQ ID NO: 8003 - protein, 22 aa, Artificial
  helical interface sequence
AADTEAVTQLIGSNIELHSLYT

SEQ ID NO: 8004 - protein, 22 aa, Artificial
  helical interface sequence
AADTQAIADIVQYHLELYTSQY

SEQ ID NO: 8005 - protein, 12 aa, Artificial
  helical interface sequence
SDQLFGMCESLY

SEQ ID NO: 8006 - protein, 13 aa, Artificial
  helical interface sequence
GTSLIIFAGIVVE

SEQ ID NO: 8007 - protein, 6 aa, Artificial
  helical interface sequence
SEELET

SEQ ID NO: 8008 - protein, 6 aa, Artificial
  helical interface sequence
ELLAVL

SEQ ID NO: 8009 - protein, 15 aa, Artificial
  helical interface sequence
ISGTFNFMIVFQAEH

SEQ ID NO: 8010 - protein, 26 aa, Artificial
  helical interface sequence
LPKMFGIHLFLAGLLCFGFGAFHLTG

SEQ ID NO: 8011 - protein, 25 aa, Artificial
  helical interface sequence
PSLKGFFIGLLSGAVVLGLTFAVLI

SEQ ID NO: 8012 - protein, 10 aa, Artificial
  helical interface sequence
TEIGIEMKFK

SEQ ID NO: 8013 - protein, 11 aa, Artificial
  helical interface sequence
IDNSVLKVVTN

SEQ ID NO: 8014 - protein, 13 aa, Artificial
  helical interface sequence
AEQIADAVIFLVS

SEQ ID NO: 8015 - protein, 27 aa, Artificial
  helical interface sequence
VETQVAELIGTNAIAPFLLTMSFAQRQ

SEQ ID NO: 8016 - protein, 8 aa, Artificial
  helical interface sequence
RKSIYDYF

SEQ ID NO: 8017 - protein, 10 aa, Artificial
  helical interface sequence
AVADLSRFEN

SEQ ID NO: 8018 - protein, 28 aa, Artificial
  helical interface sequence
KRWLHFFMLFVPVTGLWMSAIGVVGLAL

SEQ ID NO: 8019 - protein, 13 aa, Artificial
  helical interface sequence
QRALAVRAYAEKV

SEQ ID NO: 8020 - protein, 7 aa, Artificial
  helical interface sequence
PEFGQLA

SEQ ID NO: 8021 - protein, 23 aa, Artificial
  helical interface sequence
VADARVLVDFARISAQQEKVTYG

SEQ ID NO: 8022 - protein, 5 aa, Artificial
  helical interface sequence
GTWHM

SEQ ID NO: 8023 - protein, 23 aa, Artificial
  helical interface sequence
AGDFETKLSDYGHNIGIRLLELL

SEQ ID NO: 8024 - protein, 10 aa, Artificial
  helical interface sequence
LLRQAYSALF

SEQ ID NO: 8025 - protein, 35 aa, Artificial; identical to SEQ ID NO: 651
  helical interface sequence

SEQ ID NO: 8026 - protein, 7 aa, Artificial
  helical interface sequence
WKHIKHK

SEQ ID NO: 8027 - protein, 9 aa, Artificial
  helical interface sequence
INYTKLKNA

SEQ ID NO: 8028 - protein, 7 aa, Artificial
  helical interface sequence
PWTQRFF

SEQ ID NO: 8029 - protein, 9 aa, Artificial
  helical interface sequence
PGELDRIKN

SEQ ID NO: 8030 - protein, 9 aa, Artificial
  helical interface sequence
IQEWLQLTM

SEQ ID NO: 8031 - protein, 6 aa, Artificial
  helical interface sequence
SEQLTS

SEQ ID NO: 8032 - protein, 16 aa, Artificial
  helical interface sequence
AGDLGGEALERLFITY

SEQ ID NO: 8033 - protein, 7 aa, Artificial
  helical interface sequence
PWTQRFF

SEQ ID NO: 8034 - protein, 9 aa, Artificial
  helical interface sequence
MRDNWRSEL

SEQ ID NO: 8035 - protein, 9 aa, Artificial
  helical interface sequence
EEEVEQLVA

SEQ ID NO: 8036 - protein, 10 aa, Artificial
  helical interface sequence
PSVRKYAREK

SEQ ID NO: 8037 - protein, 5 aa, Artificial
  helical interface sequence
DGYYI

SEQ ID NO: 8038 - protein, 13 aa, Artificial
  helical interface sequence
WFIQSLCAMLKQY

SEQ ID NO: 8039 - protein, 18 aa, Artificial
  helical interface sequence
WPSVQQGLQQSFLHTLDS

SEQ ID NO: 8040 - protein, 17 aa, Artificial
  helical interface sequence
FCTPGIVMSMYTLLRNQ

SEQ ID NO: 8041 - protein, 11 aa, Artificial
  helical interface sequence
REEIQEVRSKS

SEQ ID NO: 8042 - protein, 19 aa, Artificial
  helical interface sequence
LKSTQAAIDQINGKLNRVI

SEQ ID NO: 8043 - protein, 18 aa, Artificial
  helical interface sequence
GAIFDRVLTELVSKMRDM

SEQ ID NO: 8044 - protein, 5 aa, Artificial
  helical interface sequence
DGRLA

SEQ ID NO: 8045 - protein, 5 aa, Artificial
  helical interface sequence
SEELK

SEQ ID NO: 8046 - protein, 7 aa, Artificial
  helical interface sequence
SADMRFF

SEQ ID NO: 8047 - protein, 5 aa, Artificial
  helical interface sequence
VFYLH

SEQ ID NO: 8048 - protein, 11 aa, Artificial
  helical interface sequence
RNALLRRLVDI

SEQ ID NO: 8049 - protein, 14 aa, Artificial
  helical interface sequence
EEQKQEIYEAFSLF

SEQ ID NO: 8050 - protein, 8 aa, Artificial
  helical interface sequence
VAWRNRCK

SEQ ID NO: 8051 - protein, 5 aa, Artificial
  helical interface sequence
RQFDW

SEQ ID NO: 8052 - protein, 13 aa, Artificial
  helical interface sequence
VNLKEKVAQLEAQ

SEQ ID NO: 8053 - protein, 11 aa, Artificial
  helical interface sequence
SDEKRELLKRY

SEQ ID NO: 8054 - protein, 5 aa, Artificial
  helical interface sequence
DLYKL

SEQ ID NO: 8055 - protein, 15 aa, Artificial
  helical interface sequence
TKIGKEVIKEMVETG

SEQ ID NO: 8056 - protein, 9 aa, Artificial
  helical interface sequence
AQDYISGAY

SEQ ID NO: 8057 - protein, 6 aa, Artificial
  helical interface sequence
INEVIH

SEQ ID NO: 8058 - protein, 17 aa, Artificial
  helical interface sequence
YCTPGMILTAKALLDKN

SEQ ID NO: 8059 - protein, 11 aa, Artificial
  helical interface sequence
VGEPALIPMIP

SEQ ID NO: 8060 - protein, 15 aa, Artificial
  helical interface sequence
YCTPGMILTAKALLD

SEQ ID NO: 8061 - protein, 20 aa, Artificial
  helical interface sequence
WRDRFLFCAEALYKAQAETG

SEQ ID NO: 8062 - protein, 15 aa, Artificial
  helical interface sequence
EENIDFWISCEEYKK

SEQ ID NO: 8063 - protein, 17 aa, Artificial
  helical interface sequence
YYERYVIGVATLMVEKG

SEQ ID NO: 8064 - protein, 13 aa, Artificial
  helical interface sequence
TAALEKLKSYFST

SEQ ID NO: 8065 - protein, 9 aa, Artificial
  helical interface sequence
YEEFVQMMT

SEQ ID NO: 8066 - protein, 27 aa, Artificial
  helical interface sequence
GPVELLLRGSSRRLDLLHQQLQELHAH

SEQ ID NO: 8067 - protein, 5 aa, Artificial
  helical interface sequence
LAGDF

SEQ ID NO: 8068 - protein, 10 aa, Artificial
  helical interface sequence
APIVKSAVWG

SEQ ID NO: 8069 - protein, 12 aa, Artificial
  helical interface sequence
SREIQTAVRLLL

SEQ ID NO: 8070 - protein, 27 aa, Artificial
  helical interface sequence
SSDLESVQGNIQRASARLEAAEKLASN

SEQ ID NO: 8071 - protein, 15 aa, Artificial
  helical interface sequence
YAWVLDKLKAERERG

SEQ ID NO: 8072 - protein, 13 aa, Artificial
  helical interface sequence
NTQIDALLAIVSE

SEQ ID NO: 8073 - protein, 9 aa, Artificial
  helical interface sequence
AVQEGFYKE

SEQ ID NO: 8074 - protein, 13 aa, Artificial
  helical interface sequence
PYVKEAENLKKYF

SEQ ID NO: 8075 - protein, 13 aa, Artificial
  helical interface sequence
FQVEYALEAVKRG

SEQ ID NO: 8076 - protein, 17 aa, Artificial
  helical interface sequence
LSELIGPVKVMLQAYDE

SEQ ID NO: 8077 - protein, 33 aa, Artificial; identical to SEQ ID NO: 3616
  helical interface sequence

SEQ ID NO: 8078 - protein, 8 aa, Artificial
  helical interface sequence
ARRTRTIG

SEQ ID NO: 8079 - protein, 12 aa, Artificial
  helical interface sequence
YQVEYALESISH

SEQ ID NO: 8080 - protein, 23 aa, Artificial
  helical interface sequence
TADAEILINTARIHAQNYLKTYN

SEQ ID NO: 8081 - protein, 5 aa, Artificial
  helical interface sequence
HTWLH

SEQ ID NO: 8082 - protein, 12 aa, Artificial
  helical interface sequence
PLTEAVSVADSQ

SEQ ID NO: 8083 - protein, 13 aa, Artificial
  helical interface sequence
TAQIDALSQMVAE

SEQ ID NO: 8084 - protein, 12 aa, Artificial
  helical interface sequence
AFTKVVSQADTR

SEQ ID NO: 8085 - protein, 13 aa, Artificial
  helical interface sequence
TAQIDALSQMVAE

SEQ ID NO: 8086 - protein, 5 aa, Artificial
  helical interface sequence
HTWLH

SEQ ID NO: 8087 - protein, 16 aa, Artificial
  helical interface sequence
AADLKAVQDKLKTFVE

SEQ ID NO: 8088 - protein, 21 aa, Artificial
  helical interface sequence
PEAHVSLDKFLSGVALALAER

SEQ ID NO: 8089 - protein, 19 aa, Artificial
  helical interface sequence
DAEVNRAKAQLKAALLLSL

SEQ ID NO: 8090 - protein, 19 aa, Artificial
  helical interface sequence
DAEVNRAKAQLKAALLLSL

SEQ ID NO: 8091 - protein, 6 aa, Artificial
  helical interface sequence
PWTQRF

SEQ ID NO: 8092 - protein, 19 aa, Artificial
  helical interface sequence
DRRVKATIEQFMKILEEID

SEQ ID NO: 8093 - protein, 15 aa, Artificial
  helical interface sequence
TDVDAANLRETFRNL

SEQ ID NO: 8094 - protein, 13 aa, Artificial
  helical interface sequence
YAAKLLFQELMAM

SEQ ID NO: 8095 - protein, 17 aa, Artificial
  helical interface sequence
QRLVQNCLWTLRNLSDA

SEQ ID NO: 8096 - protein, 19 aa, Artificial
  helical interface sequence
PIRLGLALNFSVFYYEILN

SEQ ID NO: 8097 - protein, 21 aa, Artificial
  helical interface sequence
GELAKHAVSEGTRAVTKYSSS

SEQ ID NO: 8098 - protein, 23 aa, Artificial
  helical interface sequence
LADARSLADIAREEASNFRSNFG

SEQ ID NO: 8099 - protein, 23 aa, Artificial
  helical interface sequence
LADARSLADIAREEASNFRSNFG

SEQ ID NO: 8100 - protein, 24 aa, Artificial
  helical interface sequence
KEHKRYLHIAREGEAARQHLIEAN

SEQ ID NO: 8101 - protein, 17 aa, Artificial
  helical interface sequence
EDIASNILNMLRQRVTG

SEQ ID NO: 8102 - protein, 7 aa, Artificial
  helical interface sequence
FMLFVPV

SEQ ID NO: 8103 - protein, 33 aa, Artificial; identical to SEQ ID NO: 7818
  helical interface sequence

SEQ ID NO: 8104 - protein, 18 aa, Artificial
  helical interface sequence
PEDLFETISQALLNAADR

SEQ ID NO: 8105 - protein, 8 aa, Artificial
  helical interface sequence
VAWRKHCK

SEQ ID NO: 8106 - protein, 5 aa, Artificial
  helical interface sequence
APIVL

SEQ ID NO: 8107 - protein, 16 aa, Artificial
  helical interface sequence
VKFLAITTDCLQILAY

SEQ ID NO: 8108 - protein, 22 aa, Artificial
  helical interface sequence
LLEEDKICGYVAGGLMYAAPKR

SEQ ID NO: 8109 - protein, 30 aa, Artificial
  helical interface sequence
FIGRVFLFLMIVLPLWCGLHRMHHAMHDLK

SEQ ID NO: 8110 - protein, 9 aa, Artificial
  helical interface sequence
MTYWRVLGA

SEQ ID NO: 8111 - protein, 7 aa, Artificial
  helical interface sequence
WKDVKAK

SEQ ID NO: 8112 - protein, 8 aa, Artificial
  helical interface sequence
RLRPLSYP

SEQ ID NO: 8113 - protein, 14 aa, Artificial
  helical interface sequence
LGLYNEAVKIIHDF

SEQ ID NO: 8114 - protein, 10 aa, Artificial
  helical interface sequence
HSVIGFIQRM

SEQ ID NO: 8115 - protein, 24 aa, Artificial
  helical interface sequence
HIPFAFAFAILAYLTLVLFRPVMM

SEQ ID NO: 8116 - protein, 19 aa, Artificial
  helical interface sequence
PDSLENIPEKWTPEVKHFC

SEQ ID NO: 8117 - protein, 12 aa, Artificial
  helical interface sequence
VITTTISAADAA

SEQ ID NO: 8118 - protein, 27 aa, Artificial
  helical interface sequence
GIIDDTDQNYSQRIDNIRQQLADSQNK

SEQ ID NO: 8119 - protein, 16 aa, Artificial
  helical interface sequence
QGCVAYFRSYFNRHFR

SEQ ID NO: 8120 - protein, 43 aa, Artificial; identical to SEQ ID NO: 26
  helical interface sequence

SEQ ID NO: 8121 - protein, 11 aa, Artificial
  helical interface sequence
KAQLDEILGPA

SEQ ID NO: 8122 - protein, 9 aa, Artificial
  helical interface sequence
AVPKAEWTN

SEQ ID NO: 8123 - protein, 15 aa, Artificial
  helical interface sequence
KWEAEKIHIGFRQAY

SEQ ID NO: 8124 - protein, 7 aa, Artificial
  helical interface sequence
EYEALTV

SEQ ID NO: 8125 - protein, 7 aa, Artificial
  helical interface sequence
AQEVHRW

SEQ ID NO: 8126 - protein, 15 aa, Artificial
  helical interface sequence
EEQIAEFKEAFSLFD

SEQ ID NO: 8127 - protein, 14 aa, Artificial
  helical interface sequence
YTVWHFRRVLLRSL

SEQ ID NO: 8128 - protein, 7 aa, Artificial
  helical interface sequence
RFDRIAH

SEQ ID NO: 8129 - protein, 12 aa, Artificial
  helical interface sequence
HTLGNLIRAELL

SEQ ID NO: 8130 - protein, 12 aa, Artificial
  helical interface sequence
LTARLYSLLFRR

SEQ ID NO: 8131 - protein, 7 aa, Artificial
  helical interface sequence
PIQGFSA

SEQ ID NO: 8132 - protein, 32 aa, Artificial; identical to SEQ ID NO: 1282
  helical interface sequence

SEQ ID NO: 8133 - protein, 23 aa, Artificial
  helical interface sequence
PWPLTGALSALLMTSGLTMWFHF

SEQ ID NO: 8134 - protein, 7 aa, Artificial
  helical interface sequence
PIQGFSA

SEQ ID NO: 8135 - protein, 22 aa, Artificial
  helical interface sequence
YNEFENLRRAGIVHADMRGYSY

SEQ ID NO: 8136 - protein, 23 aa, Artificial
  helical interface sequence
AGIAIELVRLFAVELEHYEKIEG

SEQ ID NO: 8137 - protein, 12 aa, Artificial
  helical interface sequence
ESDAAKKLQEFI

SEQ ID NO: 8138 - protein, 9 aa, Artificial
  helical interface sequence
FMDVYQRSY

SEQ ID NO: 8139 - protein, 15 aa, Artificial
  helical interface sequence
TEFEYLRKVLFEYMM

SEQ ID NO: 8140 - protein, 17 aa, Artificial
  helical interface sequence
LSFQRVLQRAVFHVQSS

SEQ ID NO: 8141 - protein, 32 aa, Artificial
  helical interface sequence
EESEQATEMLVHNAQNLMQSVKETVREAEAAS

SEQ ID NO: 8142 - protein, 7 aa, Artificial
  helical interface sequence
REDFENA

SEQ ID NO: 8143 - protein, 15 aa, Artificial
  helical interface sequence
RIELSRLIGLLLETE

SEQ ID NO: 8144 - protein, 22 aa, Artificial
  helical interface sequence
TADAEILINTARIHAQNYLKTY

SEQ ID NO: 8145 - protein, 20 aa, Artificial
  helical interface sequence
ISDMQHIERLLKDLVTENAY

SEQ ID NO: 8146 - protein, 19 aa, Artificial
  helical interface sequence
VEDALYLGKRSILAAAHRD

SEQ ID NO: 8147 - protein, 22 aa, Artificial
  helical interface sequence
GDTVQFAEYIQANIQLYSIRED

SEQ ID NO: 8148 - protein, 22 aa, Artificial
  helical interface sequence
IPDGRHLVNRGREEAASFKKLY

SEQ ID NO: 8149 - protein, 18 aa, Artificial
  helical interface sequence
PYNAIAFSAPIAVFVSVF

SEQ ID NO: 8150 - protein, 18 aa, Artificial
  helical interface sequence
AHAGLIVFWAGAMTLFEL

SEQ ID NO: 8151 - protein, 13 aa, Artificial
  helical interface sequence
ALFIAGWLFVSTG

SEQ ID NO: 8152 - protein, 26 aa, Artificial
  helical interface sequence
TILFQLALAALVILSFVMVIGVPVAY

SEQ ID NO: 8153 - protein, 7 aa, Artificial
  helical interface sequence
EEFGRFA

SEQ ID NO: 8154 - protein, 59 aa, Artificial
  helical interface sequence
AAVALVKANENAAAILNLKNAIQKTNAAVADVVQATQSLGTAVQAVQDHINSVVSPAIT

SEQ ID NO: 8155 - protein, 11 aa, Artificial
  helical interface sequence
PAVKRLFDMSG

SEQ ID NO: 8156 - protein, 9 aa, Artificial
  helical interface sequence
DRLRPLSYP

SEQ ID NO: 8157 - protein, 17 aa, Artificial
  helical interface sequence
PSEVEVLREKVYASLET

SEQ ID NO: 8158 - protein, 32 aa, Artificial
  helical interface sequence
GHRMWQMAGLKAQRAQTDVNNKQAAFDAAAKE

SEQ ID NO: 8159 - protein, 6 aa, Artificial
  helical interface sequence
PYSAAT

SEQ ID NO: 8160 - protein, 21 aa, Artificial
  helical interface sequence
NAPGAAANRVALEACTQARNE

SEQ ID NO: 8161 - protein, 14 aa, Artificial
  helical interface sequence
AKNYGRAVYECLRG

SEQ ID NO: 8162 - protein, 23 aa, Artificial
  helical interface sequence
PWPLTGALSALLMTSGLTMWFHF

SEQ ID NO: 8163 - protein, 5 aa, Artificial
  helical interface sequence
FAEMN

SEQ ID NO: 8164 - protein, 37 aa, Artificial
  helical interface sequence
DQIYNVVVTAHAFVMIFFMVMPIMIGGFGNWLVPLMI

SEQ ID NO: 8165 - protein, 13 aa, Artificial
  helical interface sequence
NEKLSMFYETLKS

SEQ ID NO: 8166 - protein, 15 aa, Artificial
  helical interface sequence
PDVEDLFSSLKHIQH

SEQ ID NO: 8167 - protein, 9 aa, Artificial
  helical interface sequence
SSVLAELAG

SEQ ID NO: 8168 - protein, 5 aa, Artificial
  helical interface sequence
HWKNQ

SEQ ID NO: 8169 - protein, 16 aa, Artificial
  helical interface sequence
VNLSNSLVEIKNILKS

SEQ ID NO: 8170 - protein, 16 aa, Artificial
  helical interface sequence
VNLSNSLVEIKNILKS

SEQ ID NO: 8171 - protein, 14 aa, Artificial
  helical interface sequence
VEDLLKQIEYLLRS

SEQ ID NO: 8172 - protein, 5 aa, Artificial
  helical interface sequence
IFERS

SEQ ID NO: 8173 - protein, 15 aa, Artificial
  helical interface sequence
EWKVLEELRRLAAQN

SEQ ID NO: 8174 - protein, 11 aa, Artificial
  helical interface sequence
EEEIREMLRRV

SEQ ID NO: 8175 - protein, 11 aa, Artificial
  helical interface sequence
SAMRDQYMRTG

SEQ ID NO: 8176 - protein, 11 aa, Artificial
  helical interface sequence
AAELRHVMTNL

SEQ ID NO: 8177 - protein, 25 aa, Artificial
  helical interface sequence
LYAKLMGLLADLRSINNAYSYELQR

SEQ ID NO: 8178 - protein, 13 aa, Artificial
  helical interface sequence
KDLKNTMQYLTNF

SEQ ID NO: 8179 - protein, 8 aa, Artificial
  helical interface sequence
LQIIKRLT

SEQ ID NO: 8180 - protein, 15 aa, Artificial
  helical interface sequence
EEVGGEALGRLLVVY

SEQ ID NO: 8181 - protein, 23 aa, Artificial
  helical interface sequence
VGDAQVLVRYMKAELELYRLQRR

SEQ ID NO: 8182 - protein, 25 aa, Artificial
  helical interface sequence
GATVCVLGLLLGEWINRYFNFWGWT

SEQ ID NO: 8183 - protein, 35 aa, Artificial; identical to SEQ ID NO: 5251
  helical interface sequence

SEQ ID NO: 8184 - protein, 35 aa, Artificial; identical to SEQ ID NO: 5251
  helical interface sequence

SEQ ID NO: 8185 - protein, 14 aa, Artificial
  helical interface sequence
KDSVVAAFQWATKE

SEQ ID NO: 8186 - protein, 30 aa, Artificial
  helical interface sequence
LPMAMSICHRGTGIALSAGVSLFGLSALLL

SEQ ID NO: 8187 - protein, 30 aa, Artificial
  helical interface sequence
LVARKQMGLVAMVMLGLLSVMLYLTNKRLW

SEQ ID NO: 8188 - protein, 25 aa, Artificial
  helical interface sequence
GCRMKGLIDEVNQDFTNRINKLKNS

SEQ ID NO: 8189 - protein, 68 aa, Artificial; identical to SEQ ID NO: 497
  helical interface sequence

SEQ ID NO: 8190 - protein, 12 aa, Artificial
  helical interface sequence
FFGHIWHGARTL

SEQ ID NO: 8191 - protein, 24 aa, Artificial
  helical interface sequence
VRWVAVHTLAVPTIFFLGAIAAMQ

SEQ ID NO: 8192 - protein, 9 aa, Artificial
  helical interface sequence
YEEFVTMMT

SEQ ID NO: 8193 - protein, 19 aa, Artificial
  helical interface sequence
PDEVVSLVNQGLQEGERDF

SEQ ID NO: 8194 - protein, 28 aa, Artificial
  helical interface sequence
PDEFRQAFDLAVKGINIIYNLEREALKS

SEQ ID NO: 8195 - protein, 20 aa, Artificial
  helical interface sequence
KGESVCLDRCVSKYLDIHER

SEQ ID NO: 8196 - protein, 5 aa, Artificial
  helical interface sequence
PYLET

SEQ ID NO: 8197 - protein, 13 aa, Artificial
  helical interface sequence
PQLMAAFIKQRTA

SEQ ID NO: 8198 - protein, 12 aa, Artificial
  helical interface sequence
STDLTMLKRSVL

SEQ ID NO: 8199 - protein, 5 aa, Artificial
  helical interface sequence
PKELN

SEQ ID NO: 8200 - protein, 7 aa, Artificial
  helical interface sequence
IITTVLQ

SEQ ID NO: 8201 - protein, 6 aa, Artificial
  helical interface sequence
RDCLIG

SEQ ID NO: 8202 - protein, 7 aa, Artificial
  helical interface sequence
EAILKRV

SEQ ID NO: 8203 - protein, 16 aa, Artificial
  helical interface sequence
VCPVLRQAAQQVLQRQ

SEQ ID NO: 8204 - protein, 9 aa, Artificial
  helical interface sequence
AEERRRKQN

SEQ ID NO: 8205 - protein, 29 aa, Artificial
  helical interface sequence
ADEIRTLVKDMWDTRIAKLRVSADSFVRQ

SEQ ID NO: 8206 - protein, 8 aa, Artificial
  helical interface sequence
EAEISHTQ

SEQ ID NO: 8207 - protein, 29 aa, Artificial
  helical interface sequence
PEYWDGETRKVKAHSQTHRVDLGTLRGYY

SEQ ID NO: 8208 - protein, 27 aa, Artificial
  helical interface sequence
IYEETRGVLKVFLENVIRDAVTYTEHA

SEQ ID NO: 8209 - protein, 18 aa, Artificial
  helical interface sequence
RQLANVYAQTLGTIFTEQ

SEQ ID NO: 8210 - protein, 8 aa, Artificial
  helical interface sequence
YEELKHLL

SEQ ID NO: 8211 - protein, 8 aa, Artificial
  helical interface sequence
YEELKHLL

SEQ ID NO: 8212 - protein, 32 aa, Artificial; identical to SEQ ID NO: 6008
  helical interface sequence

SEQ ID NO: 8213 - protein, 22 aa, Artificial
  helical interface sequence
KDLLEQRRAAVDTYCRHNYGVG

SEQ ID NO: 8214 - protein, 6 aa, Artificial
  helical interface sequence
ALSLLN

SEQ ID NO: 8215 - protein, 15 aa, Artificial
  helical interface sequence
EEDHRIVQKQWDILW

SEQ ID NO: 8216 - protein, 15 aa, Artificial
  helical interface sequence
MDKINNRFNYLFEVN

SEQ ID NO: 8217 - protein, 13 aa, Artificial
  helical interface sequence
PLDEIKRAFQLFD

SEQ ID NO: 8218 - protein, 14 aa, Artificial
  helical interface sequence
EEQKQEIYEAFSLF

SEQ ID NO: 8219 - protein, 7 aa, Artificial
  helical interface sequence
LETRQMN

SEQ ID NO: 8220 - protein, 12 aa, Artificial
  helical interface sequence
LFQFARLIDAKQ

SEQ ID NO: 8221 - protein, 19 aa, Artificial
  helical interface sequence
KRVQEAACSAFATLEEEAC

SEQ ID NO: 8222 - protein, 12 aa, Artificial
  helical interface sequence
VFYLHSRLLERA

SEQ ID NO: 8223 - protein, 13 aa, Artificial
  helical interface sequence
LRVLRSILENLRS

SEQ ID NO: 8224 - protein, 12 aa, Artificial
  helical interface sequence
DEEVDEMIREAD

SEQ ID NO: 8225 - protein, 6 aa, Artificial
  helical interface sequence
DEQLKS

SEQ ID NO: 8226 - protein, 17 aa, Artificial
  helical interface sequence
QASDSAYQFAKAALEKG

SEQ ID NO: 8227 - protein, 16 aa, Artificial
  helical interface sequence
QASDSAYQFAKAALEK

SEQ ID NO: 8228 - protein, 9 aa, Artificial
  helical interface sequence
RELYIHRIG

SEQ ID NO: 8229 - protein, 12 aa, Artificial
  helical interface sequence
DKVLRDLMMLSD

SEQ ID NO: 8230 - protein, 9 aa, Artificial
  helical interface sequence
RPDAEYWNS

SEQ ID NO: 8231 - protein, 32 aa, Artificial
  helical interface sequence
ARYVNALKLFISGISPLEHAAFQGYSKVGRQF

SEQ ID NO: 8232 - protein, 12 aa, Artificial
  helical interface sequence
PHLLWEVVRWQL

SEQ ID NO: 8233 - protein, 12 aa, Artificial
  helical interface sequence
YKEAQAAMEGLN

SEQ ID NO: 8234 - protein, 11 aa, Artificial
  helical interface sequence
AKNYDTLYDIM

SEQ ID NO: 8235 - protein, 16 aa, Artificial
  helical interface sequence
EDVQEQAVWALGNIAG

SEQ ID NO: 8236 - protein, 28 aa, Artificial
  helical interface sequence
GLWLIASFFMFVAVWSWWGRTYLRAQAL

SEQ ID NO: 8237 - protein, 14 aa, Artificial
  helical interface sequence
RSTVAQLVKRLTDA

SEQ ID NO: 8238 - protein, 17 aa, Artificial
  helical interface sequence
VELQQRAVEYLRLSTVA

SEQ ID NO: 8239 - protein, 14 aa, Artificial
  helical interface sequence
KKSLTEIKDVLASR

SEQ ID NO: 8240 - protein, 16 aa, Artificial
  helical interface sequence
PSCQKMKRVVQHTKGC

SEQ ID NO: 8241 - protein, 16 aa, Artificial
  helical interface sequence
RKVAREFRHKVDFLIE

SEQ ID NO: 8242 - protein, 14 aa, Artificial
  helical interface sequence
RYLREAIQEYDNIA

SEQ ID NO: 8243 - protein, 14 aa, Artificial
  helical interface sequence
VATHRKAQRAVNLI

SEQ ID NO: 8244 - protein, 14 aa, Artificial
  helical interface sequence
INSIIYGLQYLFLE

SEQ ID NO: 8245 - protein, 11 aa, Artificial
  helical interface sequence
EKLRWTFNLYD

SEQ ID NO: 8246 - protein, 11 aa, Artificial
  helical interface sequence
AMDVVYALKRQ

SEQ ID NO: 8247 - protein, 13 aa, Artificial
  helical interface sequence
TFFVELSETASIL

SEQ ID NO: 8248 - protein, 7 aa, Artificial
  helical interface sequence
PLMQELF

SEQ ID NO: 8249 - protein, 13 aa, Artificial
  helical interface sequence
EEIVMHIPELADE

SEQ ID NO: 8250 - protein, 19 aa, Artificial
  helical interface sequence
KERWEDVKEEMTSALATMR

SEQ ID NO: 8251 - protein, 15 aa, Artificial
  helical interface sequence
RERIRQIEAKALRKL

SEQ ID NO: 8252 - protein, 7 aa, Artificial
  helical interface sequence
EISARQL

SEQ ID NO: 8253 - protein, 13 aa, Artificial
  helical interface sequence
PLNAFDGALLNAG

SEQ ID NO: 8254 - protein, 11 aa, Artificial
  helical interface sequence
VSDKRDISRFL

SEQ ID NO: 8255 - protein, 18 aa, Artificial
  helical interface sequence
IEDVKNAIGVLIGGLEWN

SEQ ID NO: 8256 - protein, 22 aa, Artificial
  helical interface sequence
YKMSSINADFAFNLYRRFTVET

SEQ ID NO: 8257 - protein, 21 aa, Artificial
  helical interface sequence
WGRIVTLISFGAFVAKHLKSV

SEQ ID NO: 8258 - protein, 22 aa, Artificial
  helical interface sequence
AQGALANIAVDKANLEIMTKRS

SEQ ID NO: 8259 - protein, 13 aa, Artificial
  helical interface sequence
VAQIDALSQMVAE

SEQ ID NO: 8260 - protein, 12 aa, Artificial
  helical interface sequence
AFTKVAAQADTR

SEQ ID NO: 8261 - protein, 28 aa, Artificial
  helical interface sequence
SEHYDVARGVQKILQDYKSLQDIIAILG

SEQ ID NO: 8262 - protein, 16 aa, Artificial
  helical interface sequence
DEMFSSAKELVVVYEG

SEQ ID NO: 8263 - protein, 12 aa, Artificial
  helical interface sequence
PVIGLDEILKFI

SEQ ID NO: 8264 - protein, 19 aa, Artificial
  helical interface sequence
NTLLIVQHANVVKAARDAG

SEQ ID NO: 8265 - protein, 10 aa, Artificial
  helical interface sequence
PTVIDEVRTG

SEQ ID NO: 8266 - protein, 18 aa, Artificial
  helical interface sequence
AMQRSRILRRAVDILRER

SEQ ID NO: 8267 - protein, 11 aa, Artificial
  helical interface sequence
ASQAEECAQDV

SEQ ID NO: 8268 - protein, 12 aa, Artificial
  helical interface sequence
YLYDMIIQAYNA

SEQ ID NO: 8269 - protein, 22 aa, Artificial
  helical interface sequence
AADTQAIADIVQYHLELYTSQY

SEQ ID NO: 8270 - protein, 26 aa, Artificial
  helical interface sequence
PNDLLYVFPIVIMGSFACIVALAVLD

SEQ ID NO: 8271 - protein, 9 aa, Artificial
  helical interface sequence
PGRVFDMLN

SEQ ID NO: 8272 - protein, 44 aa, Artificial
  helical interface sequence
YWKEVAEQRRKALYEALKENEKLHKEIEQKDSEIARLRKENKDL

SEQ ID NO: 8273 - protein, 55 aa, Artificial
  helical interface sequence
SQYWKEVAEQRRKALYEALKENEKLHKEIEQKDSEIARLRKENKDLAEVAEHVQY

SEQ ID NO: 8274 - protein, 15 aa, Artificial
  helical interface sequence
ISGTFNFMIVFQAEH

SEQ ID NO: 8275 - protein, 11 aa, Artificial
  helical interface sequence
ICSTIEELRRQ

SEQ ID NO: 8276 - protein, 17 aa, Artificial
  helical interface sequence
FCTPGIVMSMYTLLRNQ

SEQ ID NO: 8277 - protein, 13 aa, Artificial
  helical interface sequence
WKRDLSKLFTSLF

SEQ ID NO: 8278 - protein, 17 aa, Artificial
  helical interface sequence
RLADGLFVNVAKELSKE

SEQ ID NO: 8279 - protein, 11 aa, Artificial
  helical interface sequence
IDNSVLKVVTN

SEQ ID NO: 8280 - protein, 26 aa, Artificial
  helical interface sequence
AQQFHRHKQLIRFLKRLDRNLWGLAG

SEQ ID NO: 8281 - protein, 17 aa, Artificial
  helical interface sequence
YGDFRQIRDIMQALLVR

SEQ ID NO: 8282 - protein, 24 aa, Artificial
  helical interface sequence
WSGILLFPCAYLALGGWLTGTTFV

SEQ ID NO: 8283 - protein, 9 aa, Artificial
  helical interface sequence
EQVKSDIEN

SEQ ID NO: 8284 - protein, 21 aa, Artificial
  helical interface sequence
KEEQIFLLHRAQAQCEKRLKE

SEQ ID NO: 8285 - protein, 19 aa, Artificial
  helical interface sequence
WRVRLAIIEYMPLLAGQLG

SEQ ID NO: 8286 - protein, 17 aa, Artificial
  helical interface sequence
YLHRMTTLFCINVLSEV

SEQ ID NO: 8287 - protein, 29 aa, Artificial
  helical interface sequence
SEYWDRETRSARDTAQIFRVNLRTLRGYY

SEQ ID NO: 8288 - protein, 14 aa, Artificial
  helical interface sequence
FTSIARIGDYILKS

SEQ ID NO: 8289 - protein, 25 aa, Artificial
  helical interface sequence
PVELEKLVREKKRELMELRFQASIG

SEQ ID NO: 8290 - protein, 11 aa, Artificial
  helical interface sequence
DDYVHEFCRYG

SEQ ID NO: 8291 - protein, 16 aa, Artificial
  helical interface sequence
DHMERFWQQSLFKYLR

SEQ ID NO: 8292 - protein, 14 aa, Artificial
  helical interface sequence
GPLFNTDYDILKSN

SEQ ID NO: 8293 - protein, 15 aa, Artificial
  helical interface sequence
FMHILTRVNRKVATE

SEQ ID NO: 8294 - protein, 11 aa, Artificial
  helical interface sequence
IVRTLHQHKLG

SEQ ID NO: 8295 - protein, 13 aa, Artificial
  helical interface sequence
GQIFEAYNMAALW

SEQ ID NO: 8296 - protein, 6 aa, Artificial
  helical interface sequence
KILEDN

SEQ ID NO: 8297 - protein, 11 aa, Artificial
  helical interface sequence
REEIQEVRSKS

SEQ ID NO: 8298 - protein, 42 aa, Artificial
  helical interface sequence
FRKARETLFAAGNYAYAHRKRRKRDFRRLWIVRINAACRQHG

SEQ ID NO: 8299 - protein, 11 aa, Artificial
  helical interface sequence
QEVKMVAWWIG

SEQ ID NO: 8300 - protein, 12 aa, Artificial
  helical interface sequence
IEPAQEEHEKYH

SEQ ID NO: 8301 - protein, 16 aa, Artificial
  helical interface sequence
IQDLRRRFFLHHLIAE

SEQ ID NO: 8302 - protein, 13 aa, Artificial
  helical interface sequence
PLDEIKRAFQLFD

SEQ ID NO: 8303 - protein, 5 aa, Artificial
  helical interface sequence
YELTR

SEQ ID NO: 8304 - protein, 17 aa, Artificial
  helical interface sequence
GCRMKGLIDEVNQDFTN

SEQ ID NO: 8305 - protein, 63 aa, Artificial; identical to SEQ ID NO: 1564
  helical interface sequence

SEQ ID NO: 8306 - protein, 6 aa, Artificial
  helical interface sequence
KSALVR

SEQ ID NO: 8307 - protein, 16 aa, Artificial
  helical interface sequence
RYEIARVISARALQLA

SEQ ID NO: 8308 - protein, 13 aa, Artificial
  helical interface sequence
YAAKLLFQELMAM

SEQ ID NO: 8309 - protein, 10 aa, Artificial
  helical interface sequence
ESTQLLMKYL

SEQ ID NO: 8310 - protein, 9 aa, Artificial
  helical interface sequence
KKWIQKVID

SEQ ID NO: 8311 - protein, 9 aa, Artificial
  helical interface sequence
KKWIQKVID

SEQ ID NO: 8312 - protein, 9 aa, Artificial
  helical interface sequence
PELADLLSG

SEQ ID NO: 8313 - protein, 13 aa, Artificial
  helical interface sequence
TVALREIRRYQKS

SEQ ID NO: 8314 - protein, 7 aa, Artificial
  helical interface sequence
QFDYYYY

SEQ ID NO: 8315 - protein, 10 aa, Artificial
  helical interface sequence
QEEYAQMMID

SEQ ID NO: 8316 - protein, 23 aa, Artificial
  helical interface sequence
IVVGALLFERAFDQGADAIYEHI

SEQ ID NO: 8317 - protein, 13 aa, Artificial
  helical interface sequence
YSRLRKMLYLIYV

SEQ ID NO: 8318 - protein, 8 aa, Artificial
  helical interface sequence
RDQLERVL

SEQ ID NO: 8319 - protein, 11 aa, Artificial
  helical interface sequence
PSVVFDDIVTN

SEQ ID NO: 8320 - protein, 13 aa, Artificial
  helical interface sequence
KNVFDEAILAALE

SEQ ID NO: 8321 - protein, 6 aa, Artificial
  helical interface sequence
KQFIDY

SEQ ID NO: 8322 - protein, 5 aa, Artificial
  helical interface sequence
LAGDF

SEQ ID NO: 8323 - protein, 7 aa, Artificial
  helical interface sequence
PAAMETH

SEQ ID NO: 8324 - protein, 13 aa, Artificial
  helical interface sequence
FAAQITRNKWERA

SEQ ID NO: 8325 - protein, 7 aa, Artificial
  helical interface sequence
REFLLDF

SEQ ID NO: 8326 - protein, 16 aa, Artificial
  helical interface sequence
PQAVLDVLEFYNSKKT

SEQ ID NO: 8327 - protein, 13 aa, Artificial
  helical interface sequence
TPYLQYAMSDFRE

SEQ ID NO: 8328 - protein, 16 aa, Artificial
  helical interface sequence
AGEYGAEALERMFLSF

SEQ ID NO: 8329 - protein, 7 aa, Artificial
  helical interface sequence
RFAKLLL

SEQ ID NO: 8330 - protein, 5 aa, Artificial
  helical interface sequence
DRLRP

SEQ ID NO: 8331 - protein, 10 aa, Artificial
  helical interface sequence
EEEEAQVRKE

SEQ ID NO: 8332 - protein, 8 aa, Artificial
  helical interface sequence
ARRTRTIG

SEQ ID NO: 8333 - protein, 23 aa, Artificial
  helical interface sequence
TADAEILINTARIHAQNYLKTYN

SEQ ID NO: 8334 - protein, 13 aa, Artificial
  helical interface sequence
GQIDYALTAVKQG

SEQ ID NO: 8335 - protein, 12 aa, Artificial
  helical interface sequence
FQVEYALEAIKQ

SEQ ID NO: 8336 - protein, 15 aa, Artificial
  helical interface sequence
VERAGHLLCDKAQKN

SEQ ID NO: 8337 - protein, 16 aa, Artificial
  helical interface sequence
KPEWEAVVAKYRPRLE

SEQ ID NO: 8338 - protein, 17 aa, Artificial
  helical interface sequence
SFHLLTDCIIVELAYLR

SEQ ID NO: 8339 - protein, 12 aa, Artificial
  helical interface sequence
PLTEAVSVADSQ

SEQ ID NO: 8340 - protein, 16 aa, Artificial
  helical interface sequence
RNYRYAGWKKAVKRAM

SEQ ID NO: 8341 - protein, 16 aa, Artificial
  helical interface sequence
ADAIGNDALSRMIVVY

SEQ ID NO: 8342 - protein, 16 aa, Artificial
  helical interface sequence
QEEFGAEALTRMFTTY

SEQ ID NO: 8343 - protein, 24 aa, Artificial
  helical interface sequence
SAVVFKQMVLQQALPMTLKGLDKA

SEQ ID NO: 8344 - protein, 19 aa, Artificial
  helical interface sequence
DAEVNRAKAQLKAALLLSL

SEQ ID NO: 8345 - protein, 19 aa, Artificial
  helical interface sequence
DAEVNRAKAQLKAALLLSL

SEQ ID NO: 8346 - protein, 19 aa, Artificial
  helical interface sequence
PENFRLLGDILIIVLAAHF

SEQ ID NO: 8347 - protein, 6 aa, Artificial
  helical interface sequence
PWTQRF

SEQ ID NO: 8348 - protein, 15 aa, Artificial
  helical interface sequence
TDVDAANLRETFRNL

SEQ ID NO: 8349 - protein, 50 aa, Artificial
  helical interface sequence
ELELQIELLRETKRKYESVLQLGRALTAHLYSLLQTQHALGDAFADLSQK

SEQ ID NO: 8350 - protein, 14 aa, Artificial
  helical interface sequence
AKNYGRAVYECLRG

SEQ ID NO: 8351 - protein, 23 aa, Artificial
  helical interface sequence
TADSRSQVQRARYEAANWKYKYG

SEQ ID NO: 8352 - protein, 11 aa, Artificial
  helical interface sequence
MLQPLLDNQVG

SEQ ID NO: 8353 - protein, 13 aa, Artificial
  helical interface sequence
HQIEYAMEAVKQG

SEQ ID NO: 8354 - protein, 22 aa, Artificial
  helical interface sequence
YADFQYLKQVLGQMVIDEELLG

SEQ ID NO: 8355 - protein, 5 aa, Artificial
  helical interface sequence
AELEK

SEQ ID NO: 8356 - protein, 22 aa, Artificial
  helical interface sequence
TADAEILINTARIHAQNYLKTY

SEQ ID NO: 8357 - protein, 20 aa, Artificial
  helical interface sequence
PENFRLLGNMIVIVLGHHLG

SEQ ID NO: 8358 - protein, 20 aa, Artificial
  helical interface sequence
AAYRMNAAQAMALRYVRELS

SEQ ID NO: 8359 - protein, 8 aa, Artificial
  helical interface sequence
LLELLRAE

SEQ ID NO: 8360 - protein, 10 aa, Artificial
  helical interface sequence
KILHRLLQEG

SEQ ID NO: 8361 - protein, 21 aa, Artificial
  helical interface sequence
IQDLEKYVEDTKIDLWSYNAE

SEQ ID NO: 8362 - protein, 21 aa, Artificial
  helical interface sequence
PAAAIQQGKVESSKDFLIATL

SEQ ID NO: 8363 - protein, 12 aa, Artificial
  helical interface sequence
PEAWAGFVDFLQ

SEQ ID NO: 8364 - protein, 37 aa, Artificial
  helical interface sequence
PTERKRQGYIHELIVTEENYVNDLQLVTEIFQKPLME

SEQ ID NO: 8365 - protein, 14 aa, Artificial
  helical interface sequence
ATKTFEKNLNHLIE

SEQ ID NO: 8366 - protein, 7 aa, Artificial
  helical interface sequence
LITIHDR

SEQ ID NO: 8367 - protein, 20 aa, Artificial
  helical interface sequence
EDESYARAYRIIRAHQTELT

SEQ ID NO: 8368 - protein, 21 aa, Artificial
  helical interface sequence
YLLPYILEAEAAAKEKDELDN

SEQ ID NO: 8369 - protein, 10 aa, Artificial
  helical interface sequence
HSVIGFIQRM

SEQ ID NO: 8370 - protein, 5 aa, Artificial
  helical interface sequence
EEFGR

SEQ ID NO: 8371 - protein, 6 aa, Artificial
  helical interface sequence
SDGFIS

SEQ ID NO: 8372 - protein, 23 aa, Artificial
  helical interface sequence
DNDYLWIEAKLEEKVAVLKARAF

SEQ ID NO: 8373 - protein, 7 aa, Artificial
  helical interface sequence
EYEALTV

SEQ ID NO: 8374 - protein, 5 aa, Artificial
  helical interface sequence
SDGFI

SEQ ID NO: 8375 - protein, 10 aa, Artificial
  helical interface sequence
YEEFVTMMTS

SEQ ID NO: 8376 - protein, 12 aa, Artificial
  helical interface sequence
EAELQDMINEVD

SEQ ID NO: 8377 - protein, 14 aa, Artificial
  helical interface sequence
YTVWHFRRVLLRSL

SEQ ID NO: 8378 - protein, 16 aa, Artificial
  helical interface sequence
EKFRDVYDYFRAVLQR

SEQ ID NO: 8379 - protein, 11 aa, Artificial
  helical interface sequence
KDDIIEWIYSL

SEQ ID NO: 8380 - protein, 15 aa, Artificial
  helical interface sequence
RLTIAFFALSGLDML

SEQ ID NO: 8381 - protein, 13 aa, Artificial
  helical interface sequence
NSVWNQRHFVISN

SEQ ID NO: 8382 - protein, 22 aa, Artificial
  helical interface sequence
PMIIEGQVHGGLTEAFAVAMGQ

SEQ ID NO: 8383 - protein, 22 aa, Artificial
  helical interface sequence
PMIIEGQVHGGLTEAFAVAMGQ

SEQ ID NO: 8384 - protein, 9 aa, Artificial
  helical interface sequence
LLQKNVRAQ

SEQ ID NO: 8385 - protein, 6 aa, Artificial
  helical interface sequence
PGTRAN

SEQ ID NO: 8386 - protein, 14 aa, Artificial
  helical interface sequence
VDSLGYASSLASKT

SEQ ID NO: 8387 - protein, 12 aa, Artificial
  helical interface sequence
LISALVRAHVDS

SEQ ID NO: 8388 - protein, 14 aa, Artificial
  helical interface sequence
ALSIHRLGLFLASN

SEQ ID NO: 8389 - protein, 5 aa, Artificial
  helical interface sequence
YEDRF

SEQ ID NO: 8390 - protein, 11 aa, Artificial
  helical interface sequence
TNETTKSIERG

SEQ ID NO: 8391 - protein, 25 aa, Artificial
  helical interface sequence
AIVQIGWAATCVMFSFSLSLVVWGR

SEQ ID NO: 8392 - protein, 9 aa, Artificial
  helical interface sequence
QAAYLLRKH

SEQ ID NO: 8393 - protein, 12 aa, Artificial
  helical interface sequence
KVTLSKIAQELS

SEQ ID NO: 8394 - protein, 13 aa, Artificial
  helical interface sequence
IELSRLIGLLLET

SEQ ID NO: 8395 - protein, 12 aa, Artificial
  helical interface sequence
NLFQALIDIQEF

SEQ ID NO: 8396 - protein, 22 aa, Artificial
  helical interface sequence
AADTEAVTQLIGSNIELHSLYT

SEQ ID NO: 8397 - protein, 22 aa, Artificial
  helical interface sequence
AADTEAVTQLIGSNIELHSLYT

SEQ ID NO: 8398 - protein, 11 aa, Artificial
  helical interface sequence
FQVEYSLEAIK

SEQ ID NO: 8399 - protein, 23 aa, Artificial
  helical interface sequence
NADSRILIEKARVEAQSHRLTLE

SEQ ID NO: 8400 - protein, 22 aa, Artificial
  helical interface sequence
AADGDALVKRFKNSVKWYHFDH

SEQ ID NO: 8401 - protein, 13 aa, Artificial
  helical interface sequence
QYIEGEMRTRIRY

SEQ ID NO: 8402 - protein, 21 aa, Artificial
  helical interface sequence
VKYRRRVLLAISRKVVDQLWE

SEQ ID NO: 8403 - protein, 61 aa, Artificial
  helical interface sequence
AAVALVKANENAAAILNLKNAIQKTNAAVADVVQATQSLGTAVQAVQDHINSVVSPAITAA

SEQ ID NO: 8404 - protein, 11 aa, Artificial
  helical interface sequence
ADAQSALRRTM

SEQ ID NO: 8405 - protein, 10 aa, Artificial
  helical interface sequence
KRERDVWEND

SEQ ID NO: 8406 - protein, 8 aa, Artificial
  helical interface sequence
REDTRLLT

SEQ ID NO: 8407 - protein, 16 aa, Artificial
  helical interface sequence
EGVATYAAAVLFRMSE

SEQ ID NO: 8408 - protein, 12 aa, Artificial
  helical interface sequence
YAVNTGQISIRH

SEQ ID NO: 8409 - protein, 11 aa, Artificial
  helical interface sequence
PWGWVSQIASG

SEQ ID NO: 8410 - protein, 13 aa, Artificial
  helical interface sequence
TVALREIRRYQKS

SEQ ID NO: 8411 - protein, 7 aa, Artificial
  helical interface sequence
PEFAQLR

SEQ ID NO: 8412 - protein, 11 aa, Artificial
  helical interface sequence
AQMMRGRLRKI

SEQ ID NO: 8413 - protein, 10 aa, Artificial
  helical interface sequence
FDQLVSQVAK

SEQ ID NO: 8414 - protein, 14 aa, Artificial
  helical interface sequence
DEQIAAQVDYIVAN

SEQ ID NO: 8415 - protein, 16 aa, Artificial
  helical interface sequence
YMGMVWAMMSIGFLGF

SEQ ID NO: 8416 - protein, 12 aa, Artificial
  helical interface sequence
SMKDFEEMRKAG

SEQ ID NO: 8417 - protein, 13 aa, Artificial
  helical interface sequence
RQWKAEFHRWSSY

SEQ ID NO: 8418 - protein, 8 aa, Artificial
  helical interface sequence
FTRWCQLG

SEQ ID NO: 8419 - protein, 11 aa, Artificial
  helical interface sequence
EEEIREMLRRV

SEQ ID NO: 8420 - protein, 19 aa, Artificial
  helical interface sequence
SEMQRLTKYPLLLESIIKH

SEQ ID NO: 8421 - protein, 28 aa, Artificial
  helical interface sequence
AELKRFRKEYIQPVQLRVLNVCRHWVEH

SEQ ID NO: 8422 - protein, 23 aa, Artificial
  helical interface sequence
EKKRKISIFRGIQAYNEIENVLK

SEQ ID NO: 8423 - protein, 13 aa, Artificial
  helical interface sequence
SAEFIKNLSSIRR

SEQ ID NO: 8424 - protein, 14 aa, Artificial
  helical interface sequence
PGFTALIKTLRKCK

SEQ ID NO: 8425 - protein, 18 aa, Artificial
  helical interface sequence
KKQRQTLRKMVIDMVLAT

SEQ ID NO: 8426 - protein, 15 aa, Artificial
  helical interface sequence
KLKFDKLYKMLTEIY

SEQ ID NO: 8427 - protein, 17 aa, Artificial
  helical interface sequence
RELLITDLLLRIEHYLQ

SEQ ID NO: 8428 - protein, 8 aa, Artificial
  helical interface sequence
RKKWIHCF

SEQ ID NO: 8429 - protein, 23 aa, Artificial
  helical interface sequence
VADARVLVDFARISAQQEKVTYG

SEQ ID NO: 8430 - protein, 9 aa, Artificial
  helical interface sequence
DTFWDYVSL

SEQ ID NO: 8431 - protein, 12 aa, Artificial
  helical interface sequence
FILREKITHFDH

SEQ ID NO: 8432 - protein, 19 aa, Artificial
  helical interface sequence
PLLQGRLFSYTDTQISRLG

SEQ ID NO: 8433 - protein, 13 aa, Artificial
  helical interface sequence
FHRRELWEAIEAG

SEQ ID NO: 8434 - protein, 9 aa, Artificial
  helical interface sequence
YRLTQGVVK

SEQ ID NO: 8435 - protein, 13 aa, Artificial
  helical interface sequence
KAEVAAEFLNDRV

SEQ ID NO: 8436 - protein, 15 aa, Artificial
  helical interface sequence
TGHSLLHTLYGRSLR

SEQ ID NO: 8437 - protein, 12 aa, Artificial
  helical interface sequence
EEEIREAFRVFD

SEQ ID NO: 8438 - protein, 13 aa, Artificial
  helical interface sequence
IPEKWTPEVKHFC

SEQ ID NO: 8439 - protein, 16 aa, Artificial
  helical interface sequence
LSLALYVFDEYLQKTV

SEQ ID NO: 8440 - protein, 5 aa, Artificial
  helical interface sequence
KRLSH

SEQ ID NO: 8441 - protein, 9 aa, Artificial
  helical interface sequence
RNNNDRMKV

SEQ ID NO: 8442 - protein, 17 aa, Artificial
  helical interface sequence
QKEIDRLNEVAKNLNES

SEQ ID NO: 8443 - protein, 16 aa, Artificial
  helical interface sequence
SNLIKQVELLDKSFNK

SEQ ID NO: 8444 - protein, 23 aa, Artificial
  helical interface sequence
PAEVEALREKVYASLEAYCKHKY

SEQ ID NO: 8445 - protein, 10 aa, Artificial
  helical interface sequence
REDQIALLKT

SEQ ID NO: 8446 - protein, 5 aa, Artificial
  helical interface sequence
HTWLH

SEQ ID NO: 8447 - protein, 13 aa, Artificial
  helical interface sequence
TAAQITQRKWEAA

SEQ ID NO: 8448 - protein, 11 aa, Artificial
  helical interface sequence
VEYFTSQQVTG

SEQ ID NO: 8449 - protein, 30 aa, Artificial; identical to SEQ ID NO: 4916
  helical interface sequence

SEQ ID NO: 8450 - protein, 21 aa, Artificial
  helical interface sequence
EKLFDELLDVSINCARKLREK

SEQ ID NO: 8451 - protein, 18 aa, Artificial
  helical interface sequence
RRSIEISKVSKEAFEAVI

SEQ ID NO: 8452 - protein, 28 aa, Artificial
  helical interface sequence
PDEFRQAFDLAVKGINIIYNLEREALKS

SEQ ID NO: 8453 - protein, 18 aa, Artificial
  helical interface sequence
NSMRAILVDWLVEVGEEY

SEQ ID NO: 8454 - protein, 23 aa, Artificial
  helical interface sequence
KIMKVIRKNIVKKLIEAFNEIAE

SEQ ID NO: 8455 - protein, 12 aa, Artificial
  helical interface sequence
FEELKQRVERLY

SEQ ID NO: 8456 - protein, 11 aa, Artificial
  helical interface sequence
LGALAEASLTC

SEQ ID NO: 8457 - protein, 14 aa, Artificial
  helical interface sequence
PYLIANKLKKYIKE

SEQ ID NO: 8458 - protein, 14 aa, Artificial
  helical interface sequence
EAEKYAYADRSEYL

SEQ ID NO: 8459 - protein, 6 aa, Artificial
  helical interface sequence
RDCLIG

SEQ ID NO: 8460 - protein, 83 aa, Artificial; identical to SEQ ID NO: 106
  helical interface sequence

SEQ ID NO: 8461 - protein, 9 aa, Artificial
  helical interface sequence
AEERRRKQN

SEQ ID NO: 8462 - protein, 22 aa, Artificial
  helical interface sequence
PVATTIFLFGTLVTIWLGIGAT

SEQ ID NO: 8463 - protein, 6 aa, Artificial
  helical interface sequence
NALRFH

SEQ ID NO: 8464 - protein, 13 aa, Artificial
  helical interface sequence
NESKWNINVRQLL

SEQ ID NO: 8465 - protein, 13 aa, Artificial
  helical interface sequence
NESKWNINVRQLL

SEQ ID NO: 8466 - protein, 12 aa, Artificial
  helical interface sequence
REFIRAVIFTCG

SEQ ID NO: 8467 - protein, 13 aa, Artificial
  helical interface sequence
STDIGSVASFLLS

SEQ ID NO: 8468 - protein, 13 aa, Artificial
  helical interface sequence
PSFVNLQSLPYAC

SEQ ID NO: 8469 - protein, 5 aa, Artificial
  helical interface sequence
LSCKL

SEQ ID NO: 8470 - protein, 11 aa, Artificial
  helical interface sequence
PTEVMGVASFY

SEQ ID NO: 8471 - protein, 15 aa, Artificial
  helical interface sequence
VDLAFASVEHIMRNV

SEQ ID NO: 8472 - protein, 5 aa, Artificial
  helical interface sequence
VTTLG

SEQ ID NO: 8473 - protein, 5 aa, Artificial
  helical interface sequence
SEQLT

SEQ ID NO: 8474 - protein, 6 aa, Artificial
  helical interface sequence
YDILTT

SEQ ID NO: 8475 - protein, 7 aa, Artificial
  helical interface sequence
LETRQMN

SEQ ID NO: 8476 - protein, 6 aa, Artificial
  helical interface sequence
SALIYY

SEQ ID NO: 8477 - protein, 18 aa, Artificial
  helical interface sequence
KKKNVLHERMEQSILPLF

SEQ ID NO: 8478 - protein, 15 aa, Artificial
  helical interface sequence
DYAVRLREKQKLRRI

SEQ ID NO: 8479 - protein, 14 aa, Artificial
  helical interface sequence
RSTVAQLVQTLEQH

SEQ ID NO: 8480 - protein, 6 aa, Artificial
  helical interface sequence
DQQKQL

SEQ ID NO: 8481 - protein, 9 aa, Artificial
  helical interface sequence
IDTILSSKL

SEQ ID NO: 8482 - protein, 6 aa, Artificial
  helical interface sequence
YNVALE

SEQ ID NO: 8483 - protein, 12 aa, Artificial
  helical interface sequence
DKVLRDLMMLSD

SEQ ID NO: 8484 - protein, 6 aa, Artificial
  helical interface sequence
YNVALE

SEQ ID NO: 8485 - protein, 10 aa, Artificial
  helical interface sequence
WRVRYMVADK

SEQ ID NO: 8486 - protein, 18 aa, Artificial
  helical interface sequence
IDDLIHFTLKQWNRLTIS

SEQ ID NO: 8487 - protein, 27 aa, Artificial
  helical interface sequence
VEQIKRNIAILDEIMAKADNDLSYFIS

SEQ ID NO: 8488 - protein, 6 aa, Artificial
  helical interface sequence
VERKRE

SEQ ID NO: 8489 - protein, 13 aa, Artificial
  helical interface sequence
VSLIRELGRKVAK

SEQ ID NO: 8490 - protein, 11 aa, Artificial
  helical interface sequence
EEEIREAFRVF

SEQ ID NO: 8491 - protein, 11 aa, Artificial
  helical interface sequence
ALELLMAANFL

SEQ ID NO: 8492 - protein, 5 aa, Artificial
  helical interface sequence
RPFCT

SEQ ID NO: 8493 - protein, 22 aa, Artificial
  helical interface sequence
PSVKLATLTLLASVIKKLNKIQ

SEQ ID NO: 8494 - protein, 16 aa, Artificial
  helical interface sequence
CTLQFESAWVLTNIAS

SEQ ID NO: 8495 - protein, 7 aa, Artificial
  helical interface sequence
TELFYKG

SEQ ID NO: 8496 - protein, 18 aa, Artificial
  helical interface sequence
TQVQLTLLTAIVKLFLKK

SEQ ID NO: 8497 - protein, 7 aa, Artificial
  helical interface sequence
ELDLVFN

SEQ ID NO: 8498 - protein, 16 aa, Artificial
  helical interface sequence
LEYIRTVIYICASSRW

SEQ ID NO: 8499 - protein, 20 aa, Artificial
  helical interface sequence
LLGACSGAIAGLVGVTPACG

SEQ ID NO: 8500 - protein, 10 aa, Artificial
  helical interface sequence
ERVKRGMAEM

SEQ ID NO: 8501 - protein, 10 aa, Artificial
  helical interface sequence
ERVKRGMAEM

SEQ ID NO: 8502 - protein, 8 aa, Artificial
  helical interface sequence
KALKDAVK

SEQ ID NO: 8503 - protein, 5 aa, Artificial
  helical interface sequence
PEFAQ

SEQ ID NO: 8504 - protein, 15 aa, Artificial
  helical interface sequence
VADMLVKVNALIKDR

SEQ ID NO: 8505 - protein, 15 aa, Artificial
  helical interface sequence
VADMLVKVNALIKDR

SEQ ID NO: 8506 - protein, 6 aa, Artificial
  helical interface sequence
QFWDLN

SEQ ID NO: 8507 - protein, 10 aa, Artificial
  helical interface sequence
KENIIAAAQA

SEQ ID NO: 8508 - protein, 5 aa, Artificial
  helical interface sequence
NALRF

SEQ ID NO: 8509 - protein, 7 aa, Artificial
  helical interface sequence
LDDILMS

SEQ ID NO: 8510 - protein, 18 aa, Artificial
  helical interface sequence
KAVDWWALGVLIYEMAAG

SEQ ID NO: 8511 - protein, 7 aa, Artificial
  helical interface sequence
SDFQCRD

SEQ ID NO: 8512 - protein, 15 aa, Artificial
  helical interface sequence
VDLAFASVEHIMRNV

SEQ ID NO: 8513 - protein, 15 aa, Artificial
  helical interface sequence
VDLAFASVEHIMRNV

SEQ ID NO: 8514 - protein, 15 aa, Artificial
  helical interface sequence
GGTHLIQILNVMENA

SEQ ID NO: 8515 - protein, 11 aa, Artificial
  helical interface sequence
ADVKDNLTKMG

SEQ ID NO: 8516 - protein, 13 aa, Artificial
  helical interface sequence
EKEYVEMLDRLYS

SEQ ID NO: 8517 - protein, 20 aa, Artificial
  helical interface sequence
EFADNLDSDFKVRQYLTKEL

SEQ ID NO: 8518 - protein, 14 aa, Artificial
  helical interface sequence
FLDLCAMLVCKLFS

SEQ ID NO: 8519 - protein, 8 aa, Artificial
  helical interface sequence
VQAFERLL

SEQ ID NO: 8520 - protein, 15 aa, Artificial
  helical interface sequence
RMEESKALFRTIITY

SEQ ID NO: 8521 - protein, 19 aa, Artificial
  helical interface sequence
AVQKFFLEEIQLGEELLAQ

SEQ ID NO: 8522 - protein, 13 aa, Artificial
  helical interface sequence
KFAKTLSDTVQDF

SEQ ID NO: 8523 - protein, 11 aa, Artificial
  helical interface sequence
TQVQLTLLTAI

SEQ ID NO: 8524 - protein, 10 aa, Artificial
  helical interface sequence
ETAYGLLTAE

SEQ ID NO: 8525 - protein, 12 aa, Artificial
  helical interface sequence
AQDYISGAYLLT

SEQ ID NO: 8526 - protein, 11 aa, Artificial
  helical interface sequence
PTELFFHAAGG

SEQ ID NO: 8527 - protein, 9 aa, Artificial
  helical interface sequence
RPDAEYWNS

SEQ ID NO: 8528 - protein, 18 aa, Artificial
  helical interface sequence
KQYRHLLLEDQRIRGLLE

SEQ ID NO: 8529 - protein, 7 aa, Artificial
  helical interface sequence
LRELAHK

SEQ ID NO: 8530 - protein, 12 aa, Artificial
  helical interface sequence
DLAAEAVVLHYT

SEQ ID NO: 8531 - protein, 5 aa, Artificial
  helical interface sequence
KYELD

SEQ ID NO: 8532 - protein, 8 aa, Artificial
  helical interface sequence
LNVNELAT

SEQ ID NO: 8533 - protein, 18 aa, Artificial
  helical interface sequence
AMQRSRILRRAVDILRER

SEQ ID NO: 8534 - protein, 11 aa, Artificial
  helical interface sequence
LARAHRAIHRL

SEQ ID NO: 8535 - protein, 11 aa, Artificial
  helical interface sequence
LARAHRAIHRL

SEQ ID NO: 8536 - protein, 11 aa, Artificial
  helical interface sequence
ASQAEECAQDV

SEQ ID NO: 8537 - protein, 20 aa, Artificial
  helical interface sequence
ARSMIEHARTAAVTHNLYYD

SEQ ID NO: 8538 - protein, 20 aa, Artificial
  helical interface sequence
ARSMIEHARTAAVTHNLYYD

SEQ ID NO: 8539 - protein, 14 aa, Artificial
  helical interface sequence
IQTLLSVINMGETL

SEQ ID NO: 8540 - protein, 6 aa, Artificial
  helical interface sequence
DIINRA

SEQ ID NO: 8541 - protein, 29 aa, Artificial
  helical interface sequence
PSLKGFFIGLLSGAVVLGLTFAVLIAISQ

SEQ ID NO: 8542 - protein, 13 aa, Artificial
  helical interface sequence
FHSTVINHYRMRG

SEQ ID NO: 8543 - protein, 13 aa, Artificial
  helical interface sequence
IGPQALSRLLIVY

SEQ ID NO: 8544 - protein, 5 aa, Artificial
  helical interface sequence
RNIDA

SEQ ID NO: 8545 - protein, 11 aa, Artificial
  helical interface sequence
IDNSVLKVVTN

SEQ ID NO: 8546 - protein, 16 aa, Artificial
  helical interface sequence
NLYGDILSDLNSGLSA

SEQ ID NO: 8547 - protein, 13 aa, Artificial
  helical interface sequence
AEQIADAVIFLVS

SEQ ID NO: 8548 - protein, 13 aa, Artificial
  helical interface sequence
IVAAHGYFGRLIF

SEQ ID NO: 8549 - protein, 27 aa, Artificial
  helical interface sequence
QLGLIATALFVLVPSVFLIILYVQTES

SEQ ID NO: 8550 - protein, 13 aa, Artificial
  helical interface sequence
QRALAVRAYAEKV

SEQ ID NO: 8551 - protein, 10 aa, Artificial
  helical interface sequence
VGRVHRLLRK

SEQ ID NO: 8552 - protein, 24 aa, Artificial
  helical interface sequence
KEEQIFLLHRAQAQCEKRLKEVLQ

SEQ ID NO: 8553 - protein, 7 aa, Artificial
  helical interface sequence
PEFGQLA

SEQ ID NO: 8554 - protein, 22 aa, Artificial
  helical interface sequence
PQGGLQNIAVVKHNLGVLTKRS

SEQ ID NO: 8555 - protein, 9 aa, Artificial
  helical interface sequence
IGELIWRKG

SEQ ID NO: 8556 - protein, 23 aa, Artificial
  helical interface sequence
FRPTIYSNVIKGMRVLVDAREKL

SEQ ID NO: 8557 - protein, 20 aa, Artificial
  helical interface sequence
EDESYARAYRIIRAHQTELT

SEQ ID NO: 8558 - protein, 12 aa, Artificial
  helical interface sequence
IADVEYQFLAEQ

SEQ ID NO: 8559 - protein, 6 aa, Artificial
  helical interface sequence
KEQAQQ

SEQ ID NO: 8560 - protein, 11 aa, Artificial
  helical interface sequence
RICLRELAHKG

SEQ ID NO: 8561 - protein, 22 aa, Artificial
  helical interface sequence
WDLFLKDIDELHHSYHMGVWYW

SEQ ID NO: 8562 - protein, 7 aa, Artificial
  helical interface sequence
MQELEIN

SEQ ID NO: 8563 - protein, 7 aa, Artificial
  helical interface sequence
PWTQRFF

SEQ ID NO: 8564 - protein, 7 aa, Artificial
  helical interface sequence
PWTQRFF

SEQ ID NO: 8565 - protein, 7 aa, Artificial
  helical interface sequence
PWTQRFF

SEQ ID NO: 8566 - protein, 14 aa, Artificial
  helical interface sequence
SFALETLAKIYTQQ

SEQ ID NO: 8567 - protein, 20 aa, Artificial
  helical interface sequence
EKEMASMKEEFTRLKEALEK

SEQ ID NO: 8568 - protein, 15 aa, Artificial
  helical interface sequence
EEQIAEFKEAFSLFD

SEQ ID NO: 8569 - protein, 16 aa, Artificial
  helical interface sequence
VKYVQEKKLIQRFFDE

SEQ ID NO: 8570 - protein, 16 aa, Artificial
  helical interface sequence
GESLLGTQLLVDVVTG

SEQ ID NO: 8571 - protein, 24 aa, Artificial
  helical interface sequence
AAEYYRAYLEGECVEWLHRYLKNG

SEQ ID NO: 8572 - protein, 9 aa, Artificial
  helical interface sequence
MFSHLRRIG

SEQ ID NO: 8573 - protein, 7 aa, Artificial
  helical interface sequence
LLAYLRR

SEQ ID NO: 8574 - protein, 12 aa, Artificial
  helical interface sequence
VFAQRLRQSVQT

SEQ ID NO: 8575 - protein, 14 aa, Artificial
  helical interface sequence
PEIAKEIYTTLGNQ

SEQ ID NO: 8576 - protein, 24 aa, Artificial
  helical interface sequence
VAEQDRAYLEGTCVEWLRRYLENG

SEQ ID NO: 8577 - protein, 24 aa, Artificial
  helical interface sequence
VAEQDRAYLEGTCVEWLRRYLENG

SEQ ID NO: 8578 - protein, 22 aa, Artificial
  helical interface sequence
VPRDLFEYTLANQMLTAMAQGY

SEQ ID NO: 8579 - protein, 11 aa, Artificial
  helical interface sequence
IEDVVAKAEKL

SEQ ID NO: 8580 - protein, 23 aa, Artificial
  helical interface sequence
LQEASDVLDDQIESFTKIIQNHY

SEQ ID NO: 8581 - protein, 10 aa, Artificial
  helical interface sequence
TTARRDLHKL

SEQ ID NO: 8582 - protein, 8 aa, Artificial
  helical interface sequence
MQELEINL

SEQ ID NO: 8583 - protein, 113 aa, Artificial; identical to SEQ ID NO: 1916
  helical interface sequence

SEQ ID NO: 8584 - protein, 27 aa, Artificial
  helical interface sequence
RVLRSILENLRSKIQKLESDVSAQMEY

SEQ ID NO: 8585 - protein, 15 aa, Artificial
  helical interface sequence
LLALAQALERLSLLW

SEQ ID NO: 8586 - protein, 13 aa, Artificial
  helical interface sequence
IFEMYARTRDEGF

SEQ ID NO: 8587 - protein, 13 aa, Artificial
  helical interface sequence
IFEMYARTRDEGF

SEQ ID NO: 8588 - protein, 11 aa, Artificial
  helical interface sequence
REWVLKIAKLA

SEQ ID NO: 8589 - protein, 13 aa, Artificial
  helical interface sequence
IFEMYARTRDEGF

SEQ ID NO: 8590 - protein, 6 aa, Artificial
  helical interface sequence
PIEMYL

SEQ ID NO: 8591 - protein, 12 aa, Artificial
  helical interface sequence
SHEVVAWIKKIL

SEQ ID NO: 8592 - protein, 12 aa, Artificial
  helical interface sequence
SHEVVAWIKKIL

SEQ ID NO: 8593 - protein, 6 aa, Artificial
  helical interface sequence
SEQLTS

SEQ ID NO: 8594 - protein, 11 aa, Artificial
  helical interface sequence
EETRAELSQLC

SEQ ID NO: 8595 - protein, 16 aa, Artificial
  helical interface sequence
LIETLEKAREKAVEVM

SEQ ID NO: 8596 - protein, 15 aa, Artificial
  helical interface sequence
QEQLLSEVEYLLKNG

SEQ ID NO: 8597 - protein, 15 aa, Artificial
  helical interface sequence
CEEMIKRAVFARELG

SEQ ID NO: 8598 - protein, 7 aa, Artificial
  helical interface sequence
EEFGRFA

SEQ ID NO: 8599 - protein, 5 aa, Artificial
  helical interface sequence
SVWNY

SEQ ID NO: 8600 - protein, 13 aa, Artificial
  helical interface sequence
SASQALHSDWLAR

SEQ ID NO: 8601 - protein, 9 aa, Artificial
  helical interface sequence
LKETYNSLG

SEQ ID NO: 8602 - protein, 8 aa, Artificial
  helical interface sequence
SPQAMCIG

SEQ ID NO: 8603 - protein, 11 aa, Artificial
  helical interface sequence
VYFLSKLFSTD

SEQ ID NO: 8604 - protein, 27 aa, Artificial
  helical interface sequence
SSDLESIQGNIQRAAARLEAAQKLSGN

SEQ ID NO: 8605 - protein, 10 aa, Artificial
  helical interface sequence
VQLRAKMSWF

SEQ ID NO: 8606 - protein, 11 aa, Artificial
  helical interface sequence
SFKITRGIEAV

SEQ ID NO: 8607 - protein, 29 aa, Artificial
  helical interface sequence
GWIIRYMHANGASMFFICLYMHVGRGLYY

SEQ ID NO: 8608 - protein, 14 aa, Artificial
  helical interface sequence
LKTAVQMAVFIHNH

SEQ ID NO: 8609 - protein, 6 aa, Artificial
  helical interface sequence
VQAWIR

SEQ ID NO: 8610 - protein, 9 aa, Artificial
  helical interface sequence
PIKVLHEAE

SEQ ID NO: 8611 - protein, 11 aa, Artificial
  helical interface sequence
GAELRHVLTAL

SEQ ID NO: 8612 - protein, 11 aa, Artificial
  helical interface sequence
GAELRHVLTAL

SEQ ID NO: 8613 - protein, 11 aa, Artificial
  helical interface sequence
GAELRHVLTAL

SEQ ID NO: 8614 - protein, 12 aa, Artificial
  helical interface sequence
EAAEEALQAAVN

SEQ ID NO: 8615 - protein, 10 aa, Artificial
  helical interface sequence
APIVKSAVWG

SEQ ID NO: 8616 - protein, 5 aa, Artificial
  helical interface sequence
VESFF

SEQ ID NO: 8617 - protein, 19 aa, Artificial
  helical interface sequence
GGERIALGLAFRLAMSLYL

SEQ ID NO: 8618 - protein, 12 aa, Artificial
  helical interface sequence
PLALECYHNLKM

SEQ ID NO: 8619 - protein, 13 aa, Artificial
  helical interface sequence
AFAKVVAQADARG

SEQ ID NO: 8620 - protein, 17 aa, Artificial
  helical interface sequence
FCTPGIVMSMYTLLRNQ

SEQ ID NO: 8621 - protein, 13 aa, Artificial
  helical interface sequence
FQVEYALEAVKRG

SEQ ID NO: 8622 - protein, 7 aa, Artificial
  helical interface sequence
VKWYHFD

SEQ ID NO: 8623 - protein, 22 aa, Artificial
  helical interface sequence
IPDGRHLVNRGREEAASFKKLY

SEQ ID NO: 8624 - protein, 14 aa, Artificial
  helical interface sequence
YSGFYTFSLLDHHY

SEQ ID NO: 8625 - protein, 15 aa, Artificial
  helical interface sequence
INSAARNIQHLLYGK

SEQ ID NO: 8626 - protein, 9 aa, Artificial
  helical interface sequence
DELLLGIFS

SEQ ID NO: 8627 - protein, 10 aa, Artificial
  helical interface sequence
LNVQRKAIHE

SEQ ID NO: 8628 - protein, 5 aa, Artificial
  helical interface sequence
SDGFI

SEQ ID NO: 8629 - protein, 7 aa, Artificial
  helical interface sequence
AQEVHRW

SEQ ID NO: 8630 - protein, 18 aa, Artificial
  helical interface sequence
VEEVIKLVRDSFTSATER

SEQ ID NO: 8631 - protein, 22 aa, Artificial
  helical interface sequence
NADSRILIEKARVEAQSHRLTL

SEQ ID NO: 8632 - protein, 18 aa, Artificial
  helical interface sequence
TADAFTLFELFERKLEMH

SEQ ID NO: 8633 - protein, 17 aa, Artificial
  helical interface sequence
LSTIREVAVLRHLETFE

SEQ ID NO: 8634 - protein, 15 aa, Artificial
  helical interface sequence
VSKAAADLMAYCEAH

SEQ ID NO: 8635 - protein, 11 aa, Artificial
  helical interface sequence
EEWDREIENYT

SEQ ID NO: 8636 - protein, 7 aa, Artificial
  helical interface sequence
VGCGQYS

SEQ ID NO: 8637 - protein, 11 aa, Artificial
  helical interface sequence
FSHSFSALAKF

SEQ ID NO: 8638 - protein, 16 aa, Artificial
  helical interface sequence
VADCGAEALARLLIVY

SEQ ID NO: 8639 - protein, 16 aa, Artificial
  helical interface sequence
VADCGAEALARLLIVY

SEQ ID NO: 8640 - protein, 13 aa, Artificial
  helical interface sequence
WFVQALCSILEEH

SEQ ID NO: 8641 - protein, 5 aa, Artificial
  helical interface sequence
FHRKK

SEQ ID NO: 8642 - protein, 18 aa, Artificial
  helical interface sequence
EHMKESTLEAIGYICQDI

SEQ ID NO: 8643 - protein, 14 aa, Artificial
  helical interface sequence
FEKPFLWLARKLIG

SEQ ID NO: 8644 - protein, 8 aa, Artificial
  helical interface sequence
ELDAKLNK

SEQ ID NO: 8645 - protein, 10 aa, Artificial
  helical interface sequence
KKEIKLARRL

SEQ ID NO: 8646 - protein, 13 aa, Artificial
  helical interface sequence
RARVECQSHRLTV

SEQ ID NO: 8647 - protein, 22 aa, Artificial
  helical interface sequence
YADFQYLKQVLGQMVIDEELLG

SEQ ID NO: 8648 - protein, 19 aa, Artificial
  helical interface sequence
QTEARDLVERCMRVLYYRD

SEQ ID NO: 8649 - protein, 23 aa, Artificial
  helical interface sequence
TADSRSQVQRARYEAANWKYKYG

SEQ ID NO: 8650 - protein, 13 aa, Artificial
  helical interface sequence
RARVECQSHRLTV

SEQ ID NO: 8651 - protein, 21 aa, Artificial
  helical interface sequence
IQAGATANRVALEAMILARNE

SEQ ID NO: 8652 - protein, 13 aa, Artificial
  helical interface sequence
FNEVFNDVRLLLN

SEQ ID NO: 8653 - protein, 45 aa, Artificial; identical to SEQ ID NO: 187
  helical interface sequence

SEQ ID NO: 8654 - protein, 12 aa, Artificial
  helical interface sequence
EDDIEELMKDGD

SEQ ID NO: 8655 - protein, 12 aa, Artificial
  helical interface sequence
EDDIEELMKDGD

SEQ ID NO: 8656 - protein, 38 aa, Artificial; identical to SEQ ID NO: 568
  helical interface sequence

SEQ ID NO: 8657 - protein, 22 aa, Artificial
  helical interface sequence
IPDARNAALRAKAEAAEFRYKY

SEQ ID NO: 8658 - protein, 15 aa, Artificial
  helical interface sequence
PETFTQLVSSSLYER

SEQ ID NO: 8659 - protein, 21 aa, Artificial
  helical interface sequence
AADGDALVKRFKNSVKWYHFD

SEQ ID NO: 8660 - protein, 18 aa, Artificial
  helical interface sequence
DSVLFYAITTLHNLLLHQ

SEQ ID NO: 8661 - protein, 9 aa, Artificial
  helical interface sequence
PVQQAMIDH

SEQ ID NO: 8662 - protein, 6 aa, Artificial
  helical interface sequence
ARAHVT

SEQ ID NO: 8663 - protein, 13 aa, Artificial
  helical interface sequence
HEELTRDLEKHCR

SEQ ID NO: 8664 - protein, 6 aa, Artificial
  helical interface sequence
WDVLTH

SEQ ID NO: 8665 - protein, 7 aa, Artificial
  helical interface sequence
ENQHTID

SEQ ID NO: 8666 - protein, 15 aa, Artificial
  helical interface sequence
TGFHMLHTLFQTSLQ

SEQ ID NO: 8667 - protein, 11 aa, Artificial
  helical interface sequence
CPTEMTQLELW

SEQ ID NO: 8668 - protein, 7 aa, Artificial
  helical interface sequence
FRAFKSL

SEQ ID NO: 8669 - protein, 11 aa, Artificial
  helical interface sequence
CPTEMTQLELW

SEQ ID NO: 8670 - protein, 12 aa, Artificial
  helical interface sequence
PEAWAGFVDFLQ

SEQ ID NO: 8671 - protein, 10 aa, Artificial
  helical interface sequence
PQAVLAFVAL

SEQ ID NO: 8672 - protein, 12 aa, Artificial
  helical interface sequence
VETVTELTEFAK

SEQ ID NO: 8673 - protein, 17 aa, Artificial
  helical interface sequence
ESLLGHLMIVGKKCAAD

SEQ ID NO: 8674 - protein, 12 aa, Artificial
  helical interface sequence
PKDIQLARRIRG

SEQ ID NO: 8675 - protein, 20 aa, Artificial
  helical interface sequence
DTEVERAKSLLKLQLGQLYE

SEQ ID NO: 8676 - protein, 18 aa, Artificial
  helical interface sequence
IDDLIHFTLKQWNRLTIS

SEQ ID NO: 8677 - protein, 14 aa, Artificial
  helical interface sequence
FTSIARIGDYILKS

SEQ ID NO: 8678 - protein, 23 aa, Artificial
  helical interface sequence
ELLDTERAYVEELLCVLEGYAAE

SEQ ID NO: 8679 - protein, 5 aa, Artificial
  helical interface sequence
ERKYR

SEQ ID NO: 8680 - protein, 25 aa, Artificial
  helical interface sequence
HTAWAFLSAIWLWMVLGFIRPILMG

SEQ ID NO: 8681 - protein, 10 aa, Artificial
  helical interface sequence
PDHEDTFFRD

SEQ ID NO: 8682 - protein, 18 aa, Artificial
  helical interface sequence
SLEKQKGVTNLLIKYGIE

SEQ ID NO: 8683 - protein, 9 aa, Artificial
  helical interface sequence
PVLYQHILW

SEQ ID NO: 8684 - protein, 11 aa, Artificial
  helical interface sequence
ELFQVLKMMVG

SEQ ID NO: 8685 - protein, 6 aa, Artificial
  helical interface sequence
SEELET

SEQ ID NO: 8686 - protein, 6 aa, Artificial
  helical interface sequence
EVDFRH

SEQ ID NO: 8687 - protein, 13 aa, Artificial
  helical interface sequence
EQEALEKLAAYVQ

SEQ ID NO: 8688 - protein, 10 aa, Artificial
  helical interface sequence
YEEFVTMMTS

SEQ ID NO: 8689 - protein, 13 aa, Artificial
  helical interface sequence
IIVFYNSVFMQRL

SEQ ID NO: 8690 - protein, 15 aa, Artificial
  helical interface sequence
RLTIAFFALSGLDML

SEQ ID NO: 8691 - protein, 11 aa, Artificial
  helical interface sequence
KDDIIEWIYSL

SEQ ID NO: 8692 - protein, 11 aa, Artificial
  helical interface sequence
KDDIIEWIYSL

SEQ ID NO: 8693 - protein, 14 aa, Artificial
  helical interface sequence
YTVWHFRRVLLRSL

SEQ ID NO: 8694 - protein, 13 aa, Artificial
  helical interface sequence
QIEILKANAEFFL

SEQ ID NO: 8695 - protein, 20 aa, Artificial
  helical interface sequence
DSQIEKERDVILQELQENDT

SEQ ID NO: 8696 - protein, 6 aa, Artificial
  helical interface sequence
PGTRAN

SEQ ID NO: 8697 - protein, 16 aa, Artificial
  helical interface sequence
DLIYSILTQIASDVYG

SEQ ID NO: 8698 - protein, 11 aa, Artificial
  helical interface sequence
YEDYLEGFRVF

SEQ ID NO: 8699 - protein, 6 aa, Artificial
  helical interface sequence
SEQLTS

SEQ ID NO: 8700 - protein, 8 aa, Artificial
  helical interface sequence
VQLRRKLE

SEQ ID NO: 8701 - protein, 15 aa, Artificial
  helical interface sequence
IWPHIDWLTAFSIRY

SEQ ID NO: 8702 - protein, 17 aa, Artificial
  helical interface sequence
TWFDTMLGFAISAYALK

SEQ ID NO: 8703 - protein, 23 aa, Artificial
  helical interface sequence
AGIAIELVRLFAVELEHYEKIEG

SEQ ID NO: 8704 - protein, 12 aa, Artificial
  helical interface sequence
FVYNIAQIVGEL

SEQ ID NO: 8705 - protein, 17 aa, Artificial
  helical interface sequence
LSFQRVLQRAVFHVQSS

SEQ ID NO: 8706 - protein, 8 aa, Artificial
  helical interface sequence
RETAASLL

SEQ ID NO: 8707 - protein, 31 aa, Artificial
  helical interface sequence
TEELFKTLDKINFSYILSLEEVFRDFARDYS

SEQ ID NO: 8708 - protein, 13 aa, Artificial
  helical interface sequence
KVTLSKIAQELSK

SEQ ID NO: 8709 - protein, 17 aa, Artificial
  helical interface sequence
IRDLISYGVIGLIKAVD

SEQ ID NO: 8710 - protein, 12 aa, Artificial
  helical interface sequence
NLFQALIDIQEF

SEQ ID NO: 8711 - protein, 7 aa, Artificial
  helical interface sequence
KETWETW

SEQ ID NO: 8712 - protein, 13 aa, Artificial
  helical interface sequence
QYIEGEMRTRIRY

SEQ ID NO: 8713 - protein, 20 aa, Artificial
  helical interface sequence
DSQKKAIERMKDTLRIAYLT

SEQ ID NO: 8714 - protein, 24 aa, Artificial
  helical interface sequence
KDILERKRAAVDRVCRHNYQLELR

SEQ ID NO: 8715 - protein, 7 aa, Artificial
  helical interface sequence
LHWYTGE

SEQ ID NO: 8716 - protein, 18 aa, Artificial
  helical interface sequence
PSRLKCVVEKFAVNHINR

SEQ ID NO: 8717 - protein, 64 aa, Artificial; identical to SEQ ID NO: 866
  helical interface sequence

SEQ ID NO: 8718 - protein, 30 aa, Artificial
  helical interface sequence
RIEYNVEHAVDYVERAVSDTKKAVKYQSKA

SEQ ID NO: 8719 - protein, 33 aa, Artificial; identical to SEQ ID NO: 3637
  helical interface sequence

SEQ ID NO: 8720 - protein, 8 aa, Artificial
  helical interface sequence
MHERLKGK

SEQ ID NO: 8721 - protein, 5 aa, Artificial
  helical interface sequence
YDLTR

SEQ ID NO: 8722 - protein, 18 aa, Artificial
  helical interface sequence
EVTDMMQKALFDFLKHRF

SEQ ID NO: 8723 - protein, 11 aa, Artificial
  helical interface sequence
SVMPAEVAWAV

SEQ ID NO: 8724 - protein, 18 aa, Artificial
  helical interface sequence
QAGGLDALGHARRTIRRG

SEQ ID NO: 8725 - protein, 24 aa, Artificial
  helical interface sequence
IDSQIQYWQLIRWENAIFFAAREH

SEQ ID NO: 8726 - protein, 8 aa, Artificial
  helical interface sequence
LLDRLRKH

SEQ ID NO: 8727 - protein, 9 aa, Artificial
  helical interface sequence
PMEMREACE

SEQ ID NO: 8728 - protein, 9 aa, Artificial
  helical interface sequence
QAEIDALLN

SEQ ID NO: 8729 - protein, 11 aa, Artificial
  helical interface sequence
RAQLLRNAYSW

SEQ ID NO: 8730 - protein, 21 aa, Artificial
  helical interface sequence
NAPGAAANRVALEACTQARNE

SEQ ID NO: 8731 - protein, 37 aa, Artificial; identical to SEQ ID NO: 8164
  helical interface sequence

SEQ ID NO: 8732 - protein, 29 aa, Artificial
  helical interface sequence
RKHMLQALFITITLGVYFTLLQASEYYEA

SEQ ID NO: 8733 - protein, 9 aa, Artificial
  helical interface sequence
ATTIFLFGT

SEQ ID NO: 8734 - protein, 16 aa, Artificial
  helical interface sequence
QVLQVLDRLKMKLQEK

SEQ ID NO: 8735 - protein, 12 aa, Artificial
  helical interface sequence
EIVMHIPELADE

SEQ ID NO: 8736 - protein, 5 aa, Artificial
  helical interface sequence
ICVAY

SEQ ID NO: 8737 - protein, 9 aa, Artificial
  helical interface sequence
FIDIMEVLG

SEQ ID NO: 8738 - protein, 5 aa, Artificial
  helical interface sequence
LEDLF

SEQ ID NO: 8739 - protein, 14 aa, Artificial
  helical interface sequence
PEYRAVLRAYLEAV

SEQ ID NO: 8740 - protein, 7 aa, Artificial
  helical interface sequence
DITKFIK

SEQ ID NO: 8741 - protein, 5 aa, Artificial
  helical interface sequence
AFSLF

SEQ ID NO: 8742 - protein, 13 aa, Artificial
  helical interface sequence
DLGRMLLTSIVRG

SEQ ID NO: 8743 - protein, 21 aa, Artificial
  helical interface sequence
PSRLQAILGDVCHIREQLMSV

SEQ ID NO: 8744 - protein, 25 aa, Artificial
  helical interface sequence
KVTKRLHTLEEVNNNVRLLSEMLLH

SEQ ID NO: 8745 - protein, 18 aa, Artificial
  helical interface sequence
PLLQGRLFSYTDTQISRL

SEQ ID NO: 8746 - protein, 13 aa, Artificial
  helical interface sequence
FHRRELWEAIEAG

SEQ ID NO: 8747 - protein, 17 aa, Artificial
  helical interface sequence
PFEQRHIVDGFSFELSK

SEQ ID NO: 8748 - protein, 7 aa, Artificial
  helical interface sequence
YLWERYR

SEQ ID NO: 8749 - protein, 25 aa, Artificial
  helical interface sequence
GATVCVLGLLLGEWINRYFNFWGWT

SEQ ID NO: 8750 - protein, 18 aa, Artificial
  helical interface sequence
IPTLESMLDHLAGQHAVR

SEQ ID NO: 8751 - protein, 5 aa, Artificial
  helical interface sequence
LVLPG

SEQ ID NO: 8752 - protein, 22 aa, Artificial
  helical interface sequence
TFGLMCKMADQTLFSIVEWARS

SEQ ID NO: 8753 - protein, 9 aa, Artificial
  helical interface sequence
ELWDWLYQL

SEQ ID NO: 8754 - protein, 22 aa, Artificial
  helical interface sequence
ATDVTTLNEMFRYKTNLYKLKE

SEQ ID NO: 8755 - protein, 11 aa, Artificial
  helical interface sequence
AMDVVYALKRQ

SEQ ID NO: 8756 - protein, 29 aa, Artificial
  helical interface sequence
SKAMSIMNSFVNDVFERIAGEASRLAHYN

SEQ ID NO: 8757 - protein, 10 aa, Artificial
  helical interface sequence
GRPDAEYWNS

SEQ ID NO: 8758 - protein, 8 aa, Artificial
  helical interface sequence
RPDAEYWN

SEQ ID NO: 8759 - protein, 10 aa, Artificial
  helical interface sequence
DDLKKKIKEN

SEQ ID NO: 8760 - protein, 23 aa, Artificial
  helical interface sequence
YFVIKDLFALALVLLGFFAVVAY

SEQ ID NO: 8761 - protein, 12 aa, Artificial
  helical interface sequence
ARSDLLSAIRQG

SEQ ID NO: 8762 - protein, 16 aa, Artificial
  helical interface sequence
SDAIGNDALSRMIVVY

SEQ ID NO: 8763 - protein, 9 aa, Artificial
  helical interface sequence
KEYQELNFQ

SEQ ID NO: 8764 - protein, 20 aa, Artificial
  helical interface sequence
SKMSDVKCTSVVLLSVLQQL

SEQ ID NO: 8765 - protein, 7 aa, Artificial
  helical interface sequence
EAEISHT

SEQ ID NO: 8766 - protein, 9 aa, Artificial
  helical interface sequence
MGNMKYLYD

SEQ ID NO: 8767 - protein, 6 aa, Artificial
  helical interface sequence
RYQWDS

SEQ ID NO: 8768 - protein, 12 aa, Artificial
  helical interface sequence
AKQQVETFLEQL

SEQ ID NO: 8769 - protein, 12 aa, Artificial
  helical interface sequence
TSEKFQKINQMV

SEQ ID NO: 8770 - protein, 24 aa, Artificial
  helical interface sequence
EKLFDELLDVSINCARKLREKFKE

SEQ ID NO: 8771 - protein, 12 aa, Artificial
  helical interface sequence
PAAFNEMFNEAD

SEQ ID NO: 8772 - protein, 19 aa, Artificial
  helical interface sequence
FWESDDNENMETMSQNGKK

SEQ ID NO: 8773 - protein, 7 aa, Artificial
  helical interface sequence
WAYYKAN

SEQ ID NO: 8774 - protein, 10 aa, Artificial
  helical interface sequence
REVLLGIEEE

SEQ ID NO: 8775 - protein, 5 aa, Artificial
  helical interface sequence
PKELN

SEQ ID NO: 8776 - protein, 15 aa, Artificial
  helical interface sequence
SGGIHIVQILNILEN

SEQ ID NO: 8777 - protein, 9 aa, Artificial
  helical interface sequence
IVDECCFRS

SEQ ID NO: 8778 - protein, 11 aa, Artificial
  helical interface sequence
HMNDIKQLLWN

SEQ ID NO: 8779 - protein, 26 aa, Artificial
  helical interface sequence
PNDLLYVFPVVIMGTFACIVALSVLD

SEQ ID NO: 8780 - protein, 37 aa, Artificial; identical to SEQ ID NO: 2853
  helical interface sequence

SEQ ID NO: 8781 - protein, 7 aa, Artificial
  helical interface sequence
LTDLALT

SEQ ID NO: 8782 - protein, 12 aa, Artificial
  helical interface sequence
MRQTLSEILKIH

SEQ ID NO: 8783 - protein, 27 aa, Artificial
  helical interface sequence
PAVDYSLAAALTLHGHWGLGQVITDYV

SEQ ID NO: 8784 - protein, 5 aa, Artificial
  helical interface sequence
LSCKL

SEQ ID NO: 8785 - protein, 29 aa, Artificial
  helical interface sequence
GFMLRYLHANGASLFFIAVYLHIFRGLYY

SEQ ID NO: 8786 - protein, 15 aa, Artificial
  helical interface sequence
DEIINFYMNMLMERS

SEQ ID NO: 8787 - protein, 7 aa, Artificial
  helical interface sequence
EEFGRFA

SEQ ID NO: 8788 - protein, 11 aa, Artificial
  helical interface sequence
VADVLRATGAG

SEQ ID NO: 8789 - protein, 17 aa, Artificial
  helical interface sequence
QRLVQNCLWTLRNLSDA

SEQ ID NO: 8790 - protein, 19 aa, Artificial
  helical interface sequence
PKFSAHALRILNGLDLAIN

SEQ ID NO: 8791 - protein, 20 aa, Artificial
  helical interface sequence
RTIESILEPVAQQISHLVIM

SEQ ID NO: 8792 - protein, 20 aa, Artificial
  helical interface sequence
FQEFMAFVAMVTTACHEFFE

SEQ ID NO: 8793 - protein, 6 aa, Artificial
  helical interface sequence
LYQLEN

SEQ ID NO: 8794 - protein, 10 aa, Artificial
  helical interface sequence
KLPFQRLVRE

SEQ ID NO: 8795 - protein, 46 aa, Artificial; identical to SEQ ID NO: 5279
  helical interface sequence

SEQ ID NO: 8796 - protein, 38 aa, Artificial
  helical interface sequence
KRKVIEKVQHIQLLQKNVRAQLVDMKRLEVDIDIKIRS

SEQ ID NO: 8797 - protein, 13 aa, Artificial
  helical interface sequence
VNVSRWYTLLEMD

SEQ ID NO: 8798 - protein, 16 aa, Artificial
  helical interface sequence
QASDSAYQFAKAALEK

SEQ ID NO: 8799 - protein, 9 aa, Artificial
  helical interface sequence
RELYIHRIG

SEQ ID NO: 8800 - protein, 13 aa, Artificial
  helical interface sequence
KRKVDWLTEKMRE

SEQ ID NO: 8801 - protein, 6 aa, Artificial
  helical interface sequence
PALVFN

SEQ ID NO: 8802 - protein, 15 aa, Artificial
  helical interface sequence
KRELQVLYRGFKNEC

SEQ ID NO: 8803 - protein, 12 aa, Artificial
  helical interface sequence
DKVLRDLMMLSD

SEQ ID NO: 8804 - protein, 8 aa, Artificial
  helical interface sequence
INYTKLKN

SEQ ID NO: 8805 - protein, 22 aa, Artificial
  helical interface sequence
MGSLLGLCLVIQIVTGIFMAMH

SEQ ID NO: 8806 - protein, 28 aa, Artificial
  helical interface sequence
EETKEVLKLFKLKVNQFYRHAFGIVNDY

SEQ ID NO: 8807 - protein, 19 aa, Artificial
  helical interface sequence
WWFRSLLVKGVYLIKRYYE

SEQ ID NO: 8808 - protein, 10 aa, Artificial
  helical interface sequence
TFFYPKLKSG

SEQ ID NO: 8809 - protein, 9 aa, Artificial
  helical interface sequence
PAPATTFAH

SEQ ID NO: 8810 - protein, 17 aa, Artificial
  helical interface sequence
EDKLTVSRARKIQRFLS

SEQ ID NO: 8811 - protein, 20 aa, Artificial
  helical interface sequence
SEHYDVARGVQKILQDYKSL

SEQ ID NO: 8812 - protein, 20 aa, Artificial
  helical interface sequence
NLAYLEAIHNFVEVLNEYFH

SEQ ID NO: 8813 - protein, 16 aa, Artificial
  helical interface sequence
KSLSALGNVISALAEG

SEQ ID NO: 8814 - protein, 20 aa, Artificial
  helical interface sequence
LADREVISRLRNCIISLVTQ

SEQ ID NO: 8815 - protein, 24 aa, Artificial
  helical interface sequence
KEVLERTRAELDTVCRHNYQLELR

SEQ ID NO: 8816 - protein, 10 aa, Artificial
  helical interface sequence
PRHLQLAIRN

SEQ ID NO: 8817 - protein, 10 aa, Artificial
  helical interface sequence
PRHLQLAIRN

SEQ ID NO: 8818 - protein, 6 aa, Artificial
  helical interface sequence
SQVIQS

SEQ ID NO: 8819 - protein, 21 aa, Artificial
  helical interface sequence
KAAAGRALDAIIASVTESLKE

SEQ ID NO: 8820 - protein, 15 aa, Artificial
  helical interface sequence
RVSRRRVAEIESEMN

SEQ ID NO: 8821 - protein, 15 aa, Artificial
  helical interface sequence
VADMLVKVNALIKDR

SEQ ID NO: 8822 - protein, 9 aa, Artificial
  helical interface sequence
RDWAESTLM

SEQ ID NO: 8823 - protein, 14 aa, Artificial
  helical interface sequence
PWILMSDDLSDLIH

SEQ ID NO: 8824 - protein, 21 aa, Artificial
  helical interface sequence
DAAQTHIYMLMKKDSYARYLK

SEQ ID NO: 8825 - protein, 5 aa, Artificial
  helical interface sequence
NEVLQ

SEQ ID NO: 8826 - protein, 6 aa, Artificial
  helical interface sequence
WPECAK

SEQ ID NO: 8827 - protein, 34 aa, Artificial; identical to SEQ ID NO: 2494
  helical interface sequence

SEQ ID NO: 8828 - protein, 7 aa, Artificial
  helical interface sequence
IRRASML

SEQ ID NO: 8829 - protein, 11 aa, Artificial
  helical interface sequence
TREGNDLYHEM

SEQ ID NO: 8830 - protein, 32 aa, Artificial; identical to SEQ ID NO: 462
  helical interface sequence

SEQ ID NO: 8831 - protein, 29 aa, Artificial
  helical interface sequence
GFMLRYLHANGASLFFIAVYLHIFRGLYY

SEQ ID NO: 8832 - protein, 11 aa, Artificial
  helical interface sequence
FASVEHIMRNV

SEQ ID NO: 8833 - protein, 22 aa, Artificial
  helical interface sequence
AGELYQRWERYRRECQETLAAA

SEQ ID NO: 8834 - protein, 7 aa, Artificial
  helical interface sequence
PWTQRFF

SEQ ID NO: 8835 - protein, 20 aa, Artificial
  helical interface sequence
KKEAEKTVREMAKIGFEMRG

SEQ ID NO: 8836 - protein, 17 aa, Artificial
  helical interface sequence
TEHIPRLVMQAIRAALS

SEQ ID NO: 8837 - protein, 13 aa, Artificial
  helical interface sequence
KFAKTLSDTVQDF

SEQ ID NO: 8838 - protein, 30 aa, Artificial; identical to SEQ ID NO: 280
  helical interface sequence

SEQ ID NO: 8839 - protein, 75 aa, Artificial; identical to SEQ ID NO: 2772
  helical interface sequence

SEQ ID NO: 8840 - protein, 11 aa, Artificial
  helical interface sequence
VEDFWALYNHI

SEQ ID NO: 8841 - protein, 8 aa, Artificial
  helical interface sequence
VPTRALLL

SEQ ID NO: 8842 - protein, 12 aa, Artificial
  helical interface sequence
AFTKAIVAADLR

SEQ ID NO: 8843 - protein, 7 aa, Artificial
  helical interface sequence
SEQLTSG

SEQ ID NO: 8844 - protein, 15 aa, Artificial
  helical interface sequence
IRNKIRAIGKMARVF

SEQ ID NO: 8845 - protein, 15 aa, Artificial
  helical interface sequence
PTQLANAMKLVRQQN

SEQ ID NO: 8846 - protein, 22 aa, Artificial
  helical interface sequence
LAETRSVDIVTGADVLEYYAGL

SEQ ID NO: 8847 - protein, 20 aa, Artificial
  helical interface sequence
ARSMIEHARTAAVTHNLYYD

SEQ ID NO: 8848 - protein, 20 aa, Artificial
  helical interface sequence
ISDMQHIERLLKDLVTENAY

SEQ ID NO: 8849 - protein, 15 aa, Artificial
  helical interface sequence
TETAASVFKELCYEN

SEQ ID NO: 8850 - protein, 18 aa, Artificial
  helical interface sequence
CDVLAKRMANLSQIYTQR

SEQ ID NO: 8851 - protein, 15 aa, Artificial
  helical interface sequence
TETAASVFKELCYEN

SEQ ID NO: 8852 - protein, 18 aa, Artificial
  helical interface sequence
CDVLAKRMANLSQIYTQR

SEQ ID NO: 8853 - protein, 22 aa, Artificial
  helical interface sequence
AADGDALVKRFKNSVKWYHFDH

SEQ ID NO: 8854 - protein, 18 aa, Artificial
  helical interface sequence
CDVLAKRMANLSQIYTQR

SEQ ID NO: 8855 - protein, 10 aa, Artificial
  helical interface sequence
QTFAYGVLDS

SEQ ID NO: 8856 - protein, 26 aa, Artificial
  helical interface sequence
PNDLLYVFPIVIMGSFACIVALAVLD

SEQ ID NO: 8857 - protein, 28 aa, Artificial
  helical interface sequence
SGELLNAALLSFGLIFVGWALGALLLKI

SEQ ID NO: 8858 - protein, 10 aa, Artificial
  helical interface sequence
HHELVYEAII

SEQ ID NO: 8859 - protein, 30 aa, Artificial
  helical interface sequence
ATCLLQRRQVFRQNLVERVKEQHKVFLASL

SEQ ID NO: 8860 - protein, 14 aa, Artificial
  helical interface sequence
DVLQEQVFKDLKSR

SEQ ID NO: 8861 - protein, 67 aa, Artificial; identical to SEQ ID NO: 564
  helical interface sequence

SEQ ID NO: 8862 - protein, 11 aa, Artificial
  helical interface sequence
GAVRTVLEMAG

SEQ ID NO: 8863 - protein, 16 aa, Artificial
  helical interface sequence
AEDIGADALARMLTVY

SEQ ID NO: 8864 - protein, 20 aa, Artificial
  helical interface sequence
PDNFRLLADCITVCVAMKFG

SEQ ID NO: 8865 - protein, 38 aa, Artificial
  helical interface sequence
EYDKRCCCLREIQQTEEKYTDTLGSIQQHFLKPLQRFL

SEQ ID NO: 8866 - protein, 19 aa, Artificial
  helical interface sequence
SGRIVGFFDVGRYVCEEVL

SEQ ID NO: 8867 - protein, 24 aa, Artificial
  helical interface sequence
VRWVAVHTLAVPTIFFLGAIAAMQ

SEQ ID NO: 8868 - protein, 10 aa, Artificial
  helical interface sequence
PRHLQLAVRN

SEQ ID NO: 8869 - protein, 9 aa, Artificial
  helical interface sequence
IGELIWRKG

SEQ ID NO: 8870 - protein, 24 aa, Artificial
  helical interface sequence
DACIDQCLAKYMRSWNVISKAYIS

SEQ ID NO: 8871 - protein, 5 aa, Artificial
  helical interface sequence
VKFLF

SEQ ID NO: 8872 - protein, 8 aa, Artificial
  helical interface sequence
LPGLFDGG

SEQ ID NO: 8873 - protein, 24 aa, Artificial
  helical interface sequence
NLAIQIADNFLRKVYCLYSDYVMK

SEQ ID NO: 8874 - protein, 15 aa, Artificial
  helical interface sequence
KEEALSQYRQIKQFT

SEQ ID NO: 8875 - protein, 12 aa, Artificial
  helical interface sequence
AFSSVAHTCRNV

SEQ ID NO: 8876 - protein, 8 aa, Artificial
  helical interface sequence
LLRQAYSA

SEQ ID NO: 8877 - protein, 5 aa, Artificial
  helical interface sequence
FDDLI

SEQ ID NO: 8878 - protein, 10 aa, Artificial
  helical interface sequence
PRLENAARSL

SEQ ID NO: 8879 - protein, 15 aa, Artificial
  helical interface sequence
PRGETIERVLREEKG

SEQ ID NO: 8880 - protein, 13 aa, Artificial
  helical interface sequence
RVFRSGAPLLNMF

SEQ ID NO: 8881 - protein, 8 aa, Artificial
  helical interface sequence
ALLFVAGL

SEQ ID NO: 8882 - protein, 21 aa, Artificial
  helical interface sequence
FEEFKYLWNNIKKWQGIYKRF

SEQ ID NO: 8883 - protein, 16 aa, Artificial
  helical interface sequence
PDDVGGEALGRLLVVY

SEQ ID NO: 8884 - protein, 20 aa, Artificial
  helical interface sequence
VNQAKQMLYDYVERKRKENS

SEQ ID NO: 8885 - protein, 8 aa, Artificial
  helical interface sequence
TYADFIAS

SEQ ID NO: 8886 - protein, 12 aa, Artificial
  helical interface sequence
VPNWHRDLVRVC

SEQ ID NO: 8887 - protein, 7 aa, Artificial
  helical interface sequence
DEEAEKI

SEQ ID NO: 8888 - protein, 5 aa, Artificial
  helical interface sequence
YANAN

SEQ ID NO: 8889 - protein, 15 aa, Artificial
  helical interface sequence
VKEVMHYLGQYIMVK

SEQ ID NO: 8890 - protein, 10 aa, Artificial
  helical interface sequence
SPLYDMLRKN

SEQ ID NO: 8891 - protein, 6 aa, Artificial
  helical interface sequence
KILEDN

SEQ ID NO: 8892 - protein, 27 aa, Artificial
  helical interface sequence
REDGLKYYRMMQTVRRMELKADQLYKQ

SEQ ID NO: 8893 - protein, 12 aa, Artificial
  helical interface sequence
IEPAQEEHEKYH

SEQ ID NO: 8894 - protein, 7 aa, Artificial
  helical interface sequence
FGLKLAG

SEQ ID NO: 8895 - protein, 11 aa, Artificial
  helical interface sequence
PIQIYEKIVSG

SEQ ID NO: 8896 - protein, 19 aa, Artificial
  helical interface sequence
PEVHASLDKFLCAVGAVLT

SEQ ID NO: 8897 - protein, 16 aa, Artificial
  helical interface sequence
VADCGAEALARLLIVY

SEQ ID NO: 8898 - protein, 14 aa, Artificial
  helical interface sequence
EEQKQEIYEAFSLF

SEQ ID NO: 8899 - protein, 14 aa, Artificial
  helical interface sequence
FPEFLTMMARKMKD

SEQ ID NO: 8900 - protein, 6 aa, Artificial
  helical interface sequence
AWRAYH

SEQ ID NO: 8901 - protein, 29 aa, Artificial
  helical interface sequence
SNIPTNLRVLRSILENLRSKIQKLESDVS

SEQ ID NO: 8902 - protein, 13 aa, Artificial
  helical interface sequence
EHVLTALANGLSL

SEQ ID NO: 8903 - protein, 5 aa, Artificial
  helical interface sequence
PVTEK

SEQ ID NO: 8904 - protein, 13 aa, Artificial
  helical interface sequence
LAMANSLRRVMIA

SEQ ID NO: 8905 - protein, 14 aa, Artificial
  helical interface sequence
PEVIQAMTKAMWEA

SEQ ID NO: 8906 - protein, 5 aa, Artificial
  helical interface sequence
KSALV

SEQ ID NO: 8907 - protein, 52 aa, Artificial; identical to SEQ ID NO: 3405
  helical interface sequence

SEQ ID NO: 8908 - protein, 11 aa, Artificial
  helical interface sequence
VVEWLGWFEDQ

SEQ ID NO: 8909 - protein, 7 aa, Artificial
  helical interface sequence
KEEAQQI

SEQ ID NO: 8910 - protein, 15 aa, Artificial
  helical interface sequence
DDELERILKELSNLE

SEQ ID NO: 8911 - protein, 14 aa, Artificial
  helical interface sequence
SGTAMAQIAAEELG

SEQ ID NO: 8912 - protein, 29 aa, Artificial
  helical interface sequence
DQQWETLQHIFRVYRSSFTRDVKEFAKML

SEQ ID NO: 8913 - protein, 6 aa, Artificial
  helical interface sequence
SEQLTS

SEQ ID NO: 8914 - protein, 5 aa, Artificial
  helical interface sequence
VQAWI

SEQ ID NO: 8915 - protein, 22 aa, Artificial
  helical interface sequence
AQGALANIAVDKANLEIMTKRS

SEQ ID NO: 8916 - protein, 29 aa, Artificial
  helical interface sequence
SKAMSIMNSFVNDVFERIAGEASRLAHYN

SEQ ID NO: 8917 - protein, 12 aa, Artificial
  helical interface sequence
PKDIQLARRIRG

SEQ ID NO: 8918 - protein, 12 aa, Artificial
  helical interface sequence
AFSRVVVTSDAK

SEQ ID NO: 8919 - protein, 17 aa, Artificial
  helical interface sequence
ENVQAAKNKLKAKYLMS

SEQ ID NO: 8920 - protein, 13 aa, Artificial
  helical interface sequence
ERLELCDERVSSR

SEQ ID NO: 8921 - protein, 13 aa, Artificial
  helical interface sequence
KHKIEPILKARKQ

SEQ ID NO: 8922 - protein, 14 aa, Artificial
  helical interface sequence
GRNYGRVVYEGLKG

SEQ ID NO: 8923 - protein, 9 aa, Artificial
  helical interface sequence
KNFLEASYD

SEQ ID NO: 8924 - protein, 15 aa, Artificial
  helical interface sequence
AVGNKILDHAFTNAG

SEQ ID NO: 8925 - protein, 15 aa, Artificial
  helical interface sequence
EEQIAEFKEAFSLFD

SEQ ID NO: 8926 - protein, 12 aa, Artificial
  helical interface sequence
EAELQDMINEVD

SEQ ID NO: 8927 - protein, 15 aa, Artificial
  helical interface sequence
LPVRAQLCAHLDALD

SEQ ID NO: 8928 - protein, 22 aa, Artificial
  helical interface sequence
PQGGLQNIATGKHNLEILTKRS

SEQ ID NO: 8929 - protein, 16 aa, Artificial
  helical interface sequence
ATLWNCRREVLQHLET

SEQ ID NO: 8930 - protein, 14 aa, Artificial
  helical interface sequence
PFHTLFGIAGLSLL

SEQ ID NO: 8931 - protein, 11 aa, Artificial
  helical interface sequence
PDMVWDFWSLR

SEQ ID NO: 8932 - protein, 8 aa, Artificial
  helical interface sequence
RQVSDLTF

SEQ ID NO: 8933 - protein, 10 aa, Artificial
  helical interface sequence
EATELKLGML

SEQ ID NO: 8934 - protein, 14 aa, Artificial
  helical interface sequence
AAVSDFAFASKHAE

SEQ ID NO: 8935 - protein, 14 aa, Artificial
  helical interface sequence
AAVSDFAFASKHAE

SEQ ID NO: 8936 - protein, 5 aa, Artificial
  helical interface sequence
YENAN

SEQ ID NO: 8937 - protein, 17 aa, Artificial
  helical interface sequence
PETAVLLASYAVQSKYG

SEQ ID NO: 8938 - protein, 12 aa, Artificial
  helical interface sequence
PKDIQLARRIRG

SEQ ID NO: 8939 - protein, 27 aa, Artificial
  helical interface sequence
IYEETRGVLKVFLENVIRDAVTYTEHA

SEQ ID NO: 8940 - protein, 15 aa, Artificial
  helical interface sequence
IFPHLDWTAAFSIRY

SEQ ID NO: 8941 - protein, 12 aa, Artificial
  helical interface sequence
TVALREIRRYQK

SEQ ID NO: 8942 - protein, 10 aa, Artificial
  helical interface sequence
VGRIHRHLKS

SEQ ID NO: 8943 - protein, 7 aa, Artificial
  helical interface sequence
DEDAEKI

SEQ ID NO: 8944 - protein, 16 aa, Artificial
  helical interface sequence
AGEYGAEALERMFLSF

SEQ ID NO: 8945 - protein, 8 aa, Artificial
  helical interface sequence
SLLPMMKL

SEQ ID NO: 8946 - protein, 17 aa, Artificial
  helical interface sequence
PQAVSSFVRQELAKSIR

SEQ ID NO: 8947 - protein, 13 aa, Artificial
  helical interface sequence
NSVWNQRHFVISN

SEQ ID NO: 8948 - protein, 9 aa, Artificial
  helical interface sequence
VSTLHGILS

SEQ ID NO: 8949 - protein, 20 aa, Artificial
  helical interface sequence
PENFKLLGNVLVVVLARNFG

SEQ ID NO: 8950 - protein, 12 aa, Artificial
  helical interface sequence
YQVEYALESISH

SEQ ID NO: 8951 - protein, 18 aa, Artificial
  helical interface sequence
TKLLVSEVAKIMQEATQS

SEQ ID NO: 8952 - protein, 23 aa, Artificial
  helical interface sequence
KAAVERSKMIDRNLREDGEKAAR

SEQ ID NO: 8953 - protein, 13 aa, Artificial
  helical interface sequence
TAQIDALSQMVAE

SEQ ID NO: 8954 - protein, 13 aa, Artificial
  helical interface sequence
TAQIDALSQMVAE

SEQ ID NO: 8955 - protein, 11 aa, Artificial
  helical interface sequence
FKIIVTAYKDL

SEQ ID NO: 8956 - protein, 14 aa, Artificial
  helical interface sequence
LKETVKKILMEKYE

SEQ ID NO: 8957 - protein, 15 aa, Artificial
  helical interface sequence
NNNMNLGLQNASALY

SEQ ID NO: 8958 - protein, 14 aa, Artificial
  helical interface sequence
VPSSALREICLLKE

SEQ ID NO: 8959 - protein, 12 aa, Artificial
  helical interface sequence
RADAENAMRYIN

SEQ ID NO: 8960 - protein, 5 aa, Artificial
  helical interface sequence
VHRKC

SEQ ID NO: 8961 - protein, 8 aa, Artificial
  helical interface sequence
ENLVIEFY

SEQ ID NO: 8962 - protein, 16 aa, Artificial
  helical interface sequence
VADCGAEALARLLIVY

SEQ ID NO: 8963 - protein, 13 aa, Artificial
  helical interface sequence
LDLDSRIELEMRT

SEQ ID NO: 8964 - protein, 15 aa, Artificial
  helical interface sequence
QVVVNKAAVMVHQLS

SEQ ID NO: 8965 - protein, 19 aa, Artificial
  helical interface sequence
PIRLGLALNFSVFYYEILN

SEQ ID NO: 8966 - protein, 19 aa, Artificial
  helical interface sequence
PIRLGLALNFSVFYYEILN

SEQ ID NO: 8967 - protein, 8 aa, Artificial
  helical interface sequence
ELDAKLNK

SEQ ID NO: 8968 - protein, 12 aa, Artificial
  helical interface sequence
KSELIERLATQQ

SEQ ID NO: 8969 - protein, 11 aa, Artificial
  helical interface sequence
YQVEYAMEAIG

SEQ ID NO: 8970 - protein, 14 aa, Artificial
  helical interface sequence
PYTLMSMVANLLYE

SEQ ID NO: 8971 - protein, 19 aa, Artificial
  helical interface sequence
VEQAYDLARRAIYQATYRD

SEQ ID NO: 8972 - protein, 14 aa, Artificial
  helical interface sequence
PYTLMSMVANLLYE

SEQ ID NO: 8973 - protein, 7 aa, Artificial
  helical interface sequence
LEKVLSG

SEQ ID NO: 8974 - protein, 23 aa, Artificial
  helical interface sequence
ARLRKLEVEANNAFDQYRDLYFE

SEQ ID NO: 8975 - protein, 12 aa, Artificial
  helical interface sequence
EEELSDLFRMFD

SEQ ID NO: 8976 - protein, 7 aa, Artificial
  helical interface sequence
EDDFVYF

SEQ ID NO: 8977 - protein, 5 aa, Artificial
  helical interface sequence
YLWLN

SEQ ID NO: 8978 - protein, 26 aa, Artificial
  helical interface sequence
FLPWIFIPVVCWLMPTVVMGLLFLYI

SEQ ID NO: 8979 - protein, 13 aa, Artificial
  helical interface sequence
FQVEYALEAVKRG

SEQ ID NO: 8980 - protein, 6 aa, Artificial
  helical interface sequence
PWTQRY

SEQ ID NO: 8981 - protein, 12 aa, Artificial
  helical interface sequence
RAAINKMIKETL

SEQ ID NO: 8982 - protein, 19 aa, Artificial
  helical interface sequence
EKMLQRALELLAFLKEDLE

SEQ ID NO: 8983 - protein, 20 aa, Artificial
  helical interface sequence
AAYRMNAAQAMALRYVRELS

SEQ ID NO: 8984 - protein, 18 aa, Artificial
  helical interface sequence
NSMRAILVDWLVEVGEEY

SEQ ID NO: 8985 - protein, 23 aa, Artificial
  helical interface sequence
LNDQVTLLKYGVYEAIFAMLSSV

SEQ ID NO: 8986 - protein, 12 aa, Artificial
  helical interface sequence
LLVALENQHTID

SEQ ID NO: 8987 - protein, 29 aa, Artificial
  helical interface sequence
FIGRVFLFLMIVLPLWCGLHRMHHAMHDL

SEQ ID NO: 8988 - protein, 50 aa, Artificial; identical to SEQ ID NO: 569
  helical interface sequence

SEQ ID NO: 8989 - protein, 6 aa, Artificial
  helical interface sequence
EAIIRK

SEQ ID NO: 8990 - protein, 6 aa, Artificial
  helical interface sequence
LLDYVN

SEQ ID NO: 8991 - protein, 7 aa, Artificial
  helical interface sequence
EVNWHNG

SEQ ID NO: 8992 - protein, 7 aa, Artificial
  helical interface sequence
PYQVRDC

SEQ ID NO: 8993 - protein, 14 aa, Artificial
  helical interface sequence
FTSIARIGDYILKS

SEQ ID NO: 8994 - protein, 13 aa, Artificial
  helical interface sequence
LDSYLLKPVQRIT

SEQ ID NO: 8995 - protein, 12 aa, Artificial
  helical interface sequence
AFSRVVVNSDSK

SEQ ID NO: 8996 - protein, 21 aa, Artificial
  helical interface sequence
PQGGLQNIAVVKHNLGVLTKR

SEQ ID NO: 8997 - protein, 22 aa, Artificial
  helical interface sequence
AQGALANIAVDKANLEIMTKRS

SEQ ID NO: 8998 - protein, 15 aa, Artificial
  helical interface sequence
LDTLFSRLEEYLHSR

SEQ ID NO: 8999 - protein, 15 aa, Artificial
  helical interface sequence
VKIRIESTVAGSLRS

SEQ ID NO: 9000 - protein, 9 aa, Artificial
  helical interface sequence
SLPVLFNQQ

SEQ ID NO: 9001 - protein, 17 aa, Artificial
  helical interface sequence
PYAAQLAALDAAKKAMA

SEQ ID NO: 9002 - protein, 11 aa, Artificial
  helical interface sequence
KDDIIEWIYSL

SEQ ID NO: 9003 - protein, 10 aa, Artificial
  helical interface sequence
ESAWNYLKGI

SEQ ID NO: 9004 - protein, 6 aa, Artificial
  helical interface sequence
SEQLTS

SEQ ID NO: 9005 - protein, 8 aa, Artificial
  helical interface sequence
PEQREKLD

SEQ ID NO: 9006 - protein, 7 aa, Artificial
  helical interface sequence
LIEKFLR

SEQ ID NO: 9007 - protein, 11 aa, Artificial
  helical interface sequence
EEIREAFRVFD

SEQ ID NO: 9008 - protein, 24 aa, Artificial
  helical interface sequence
RAHHNALERKRRDHIKDSFHSLRD

SEQ ID NO: 9009 - protein, 10 aa, Artificial
  helical interface sequence
TERELLESYI

SEQ ID NO: 9010 - protein, 31 aa, Artificial
  helical interface sequence
PVNLVFSAIRVALADYTGEHIATDFSDILFG

SEQ ID NO: 9011 - protein, 28 aa, Artificial
  helical interface sequence
DTWAKIHFAIMFVGVNMTFFPQHFLGLS

SEQ ID NO: 9012 - protein, 15 aa, Artificial
  helical interface sequence
LGEYSDVGNIIEQFA

SEQ ID NO: 9013 - protein, 13 aa, Artificial
  helical interface sequence
EALATLVVNTMRG

SEQ ID NO: 9014 - protein, 5 aa, Artificial
  helical interface sequence
GWWLD

SEQ ID NO: 9015 - protein, 22 aa, Artificial
  helical interface sequence
PIATILFLLGTLVAVWLGIGST

SEQ ID NO: 9016 - protein, 14 aa, Artificial
  helical interface sequence
GNKRLDSVNSIVSN

SEQ ID NO: 9017 - protein, 11 aa, Artificial
  helical interface sequence
YEDFVKKVMAG

SEQ ID NO: 9018 - protein, 6 aa, Artificial
  helical interface sequence
SEQLTS

SEQ ID NO: 9019 - protein, 6 aa, Artificial
  helical interface sequence
WTDGLT

SEQ ID NO: 9020 - protein, 8 aa, Artificial
  helical interface sequence
REETFIAH

SEQ ID NO: 9021 - protein, 18 aa, Artificial
  helical interface sequence
IRDLISYGVIGLIKAVDN

SEQ ID NO: 9022 - protein, 11 aa, Artificial
  helical interface sequence
IELSRLIGLLL

SEQ ID NO: 9023 - protein, 15 aa, Artificial
  helical interface sequence
LEKKVKELKEKIEKG

SEQ ID NO: 9024 - protein, 50 aa, Artificial; identical to SEQ ID NO: 605
  helical interface sequence

SEQ ID NO: 9025 - protein, 50 aa, Artificial; identical to SEQ ID NO: 605
  helical interface sequence

SEQ ID NO: 9026 - protein, 6 aa, Artificial
  helical interface sequence
PDEYEQ

SEQ ID NO: 9027 - protein, 15 aa, Artificial
  helical interface sequence
TETAASVFKELCYEN

SEQ ID NO: 9028 - protein, 22 aa, Artificial
  helical interface sequence
AADTQAIADIVQYHLELYTSQY

SEQ ID NO: 9029 - protein, 19 aa, Artificial
  helical interface sequence
VEDALYLGKRSILAAAHRD

SEQ ID NO: 9030 - protein, 30 aa, Artificial
  helical interface sequence
NLKAAFEKNINTERTLKTQAVNKLAEIMNR

SEQ ID NO: 9031 - protein, 8 aa, Artificial
  helical interface sequence
REETFIAH

SEQ ID NO: 9032 - protein, 19 aa, Artificial
  helical interface sequence
SKLRGHAITLTYALNNFVD

SEQ ID NO: 9033 - protein, 5 aa, Artificial
  helical interface sequence
RDDTI

SEQ ID NO: 9034 - protein, 33 aa, Artificial
  helical interface sequence
HPYITIGQLASVLYFLLILVLMPTAGTIENKLL

SEQ ID NO: 9035 - protein, 14 aa, Artificial
  helical interface sequence
TEVKQKLQEFLLSK

SEQ ID NO: 9036 - protein, 8 aa, Artificial
  helical interface sequence
HSLAPMYY

SEQ ID NO: 9037 - protein, 14 aa, Artificial
  helical interface sequence
KLPFQRLVREIAQD

SEQ ID NO: 9038 - protein, 12 aa, Artificial
  helical interface sequence
PKDIQLARRIRG

SEQ ID NO: 9039 - protein, 19 aa, Artificial
  helical interface sequence
SSVVRRELFRLVARLKQIG

SEQ ID NO: 9040 - protein, 15 aa, Artificial
  helical interface sequence
PEELQLIKAKINVLI

SEQ ID NO: 9041 - protein, 13 aa, Artificial
  helical interface sequence
LFLVAAHEIGHSL

SEQ ID NO: 9042 - protein, 7 aa, Artificial
  helical interface sequence
RPYWRCY

SEQ ID NO: 9043 - protein, 28 aa, Artificial
  helical interface sequence
KEVLEGTRAELDTVCRHNYEVAFRGILQ

SEQ ID NO: 9044 - protein, 21 aa, Artificial
  helical interface sequence
NAPGAAANRVALEACTQARNE

SEQ ID NO: 9045 - protein, 14 aa, Artificial
  helical interface sequence
DEQIAAQVDYIVAN

SEQ ID NO: 9046 - protein, 6 aa, Artificial
  helical interface sequence
PWTQRY

SEQ ID NO: 9047 - protein, 12 aa, Artificial
  helical interface sequence
SMKDFEEMRKAG

SEQ ID NO: 9048 - protein, 13 aa, Artificial
  helical interface sequence
LKERCLQVVRSLV

SEQ ID NO: 9049 - protein, 13 aa, Artificial
  helical interface sequence
RKRRKRDFRRLWI

SEQ ID NO: 9050 - protein, 18 aa, Artificial
  helical interface sequence
VDFVRKAVRAIGRCAIKV

SEQ ID NO: 9051 - protein, 29 aa, Artificial
  helical interface sequence
PEYWDQETRNMKAHSQTDRANLGTLRGYY

SEQ ID NO: 9052 - protein, 21 aa, Artificial
  helical interface sequence
NAPGAAANRVALEACVQARNE

SEQ ID NO: 9053 - protein, 15 aa, Artificial
  helical interface sequence
KTEREDLIAYLKKAT

SEQ ID NO: 9054 - protein, 10 aa, Artificial
  helical interface sequence
LHNRVHVWVG

SEQ ID NO: 9055 - protein, 14 aa, Artificial
  helical interface sequence
PEYRAVLRAYLEAV

SEQ ID NO: 9056 - protein, 5 aa, Artificial
  helical interface sequence
LEDLF

SEQ ID NO: 9057 - protein, 15 aa, Artificial
  helical interface sequence
EWKVLEELRRLAAQN

SEQ ID NO: 9058 - protein, 10 aa, Artificial
  helical interface sequence
MRPTLFRLAS

SEQ ID NO: 9059 - protein, 5 aa, Artificial
  helical interface sequence
AFSLF

SEQ ID NO: 9060 - protein, 13 aa, Artificial
  helical interface sequence
SEEEIREAFRVFD

SEQ ID NO: 9061 - protein, 24 aa, Artificial
  helical interface sequence
QEKKRKISIFRGIQAYNEIENVLK

SEQ ID NO: 9062 - protein, 9 aa, Artificial
  helical interface sequence
VDQMIREAD

SEQ ID NO: 9063 - protein, 16 aa, Artificial
  helical interface sequence
YAATPAIQLAKDYLAT

SEQ ID NO: 9064 - protein, 15 aa, Artificial
  helical interface sequence
AATPAIQLAKDYLAT

SEQ ID NO: 9065 - protein, 7 aa, Artificial
  helical interface sequence
PWTQRYF

SEQ ID NO: 9066 - protein, 32 aa, Artificial; identical to SEQ ID NO: 5976
  helical interface sequence

SEQ ID NO: 9067 - protein, 20 aa, Artificial
  helical interface sequence
APARLHWLATLLMDALKRHH

SEQ ID NO: 9068 - protein, 12 aa, Artificial
  helical interface sequence
ETSLKLSLRNLK

SEQ ID NO: 9069 - protein, 6 aa, Artificial
  helical interface sequence
TSIEER

SEQ ID NO: 9070 - protein, 16 aa, Artificial
  helical interface sequence
RLTQLQICLDQMTEQF

SEQ ID NO: 9071 - protein, 7 aa, Artificial
  helical interface sequence
LRPLSYP

SEQ ID NO: 9072 - protein, 23 aa, Artificial
  helical interface sequence
AADCQFWETWLGSQCRLHELREK

SEQ ID NO: 9073 - protein, 13 aa, Artificial
  helical interface sequence
AVDTYCRHNYGVG

SEQ ID NO: 9074 - protein, 12 aa, Artificial
  helical interface sequence
PKDIQLARRIRG

SEQ ID NO: 9075 - protein, 22 aa, Artificial
  helical interface sequence
QDAIHYMTEQAPASVVELENYG

SEQ ID NO: 9076 - protein, 48 aa, Artificial; identical to SEQ ID NO: 1509
  helical interface sequence

SEQ ID NO: 9077 - protein, 48 aa, Artificial; identical to SEQ ID NO: 1509
  helical interface sequence

SEQ ID NO: 9078 - protein, 10 aa, Artificial
  helical interface sequence
PAARNILEKH

SEQ ID NO: 9079 - protein, 25 aa, Artificial
  helical interface sequence
GCRMKGLIDEVNQDFTNRINKLKNS

SEQ ID NO: 9080 - protein, 12 aa, Artificial
  helical interface sequence
GPEAILELEHMG

SEQ ID NO: 9081 - protein, 20 aa, Artificial
  helical interface sequence
SKMSDVKCTSVVLLSVLQQL

SEQ ID NO: 9082 - protein, 18 aa, Artificial
  helical interface sequence
GPEASQAQAMTFLIRDQK

SEQ ID NO: 9083 - protein, 13 aa, Artificial
  helical interface sequence
IFRFLLFFQGFHN

SEQ ID NO: 9084 - protein, 16 aa, Artificial
  helical interface sequence
RRSIEISKVSKEAFEA

SEQ ID NO: 9085 - protein, 22 aa, Artificial
  helical interface sequence
EKLFDELLDVSINCARKLREKF

SEQ ID NO: 9086 - protein, 13 aa, Artificial
  helical interface sequence
QKEIDRLNEVAKN

SEQ ID NO: 9087 - protein, 18 aa, Artificial
  helical interface sequence
RDAIKRIAYEFVEMKAKD

SEQ ID NO: 9088 - protein, 10 aa, Artificial
  helical interface sequence
SSEVEELMKE

SEQ ID NO: 9089 - protein, 15 aa, Artificial
  helical interface sequence
RNFRLLEELEEGQKG

SEQ ID NO: 9090 - protein, 6 aa, Artificial
  helical interface sequence
LQHLEN

SEQ ID NO: 9091 - protein, 37 aa, Artificial
  helical interface sequence
RDQMRANVINEIMSTERHYIKHLKDICEGYLKQCRKR

SEQ ID NO: 9092 - protein, 7 aa, Artificial
  helical interface sequence
CQRQFLQ

SEQ ID NO: 9093 - protein, 10 aa, Artificial
  helical interface sequence
WRCQRQFLQH

SEQ ID NO: 9094 - protein, 6 aa, Artificial
  helical interface sequence
RDCLIG

SEQ ID NO: 9095 - protein, 6 aa, Artificial
  helical interface sequence
RDCLIG

SEQ ID NO: 9096 - protein, 8 aa, Artificial
  helical interface sequence
PLHWSVSF

SEQ ID NO: 9097 - protein, 27 aa, Artificial
  helical interface sequence
ILGAVFYIVFIALFFGIAVGIIFAIKS

SEQ ID NO: 9098 - protein, 17 aa, Artificial
  helical interface sequence
GKEQRILAKTIKRARIL

SEQ ID NO: 9099 - protein, 7 aa, Artificial
  helical interface sequence
LKVSIHQ

SEQ ID NO: 9100 - protein, 11 aa, Artificial
  helical interface sequence
ADEFMEAFKTF

SEQ ID NO: 9101 - protein, 7 aa, Artificial
  helical interface sequence
KLTRMLT

SEQ ID NO: 9102 - protein, 26 aa, Artificial
  helical interface sequence
PDERAQQAALHAQQDAVTKIADLQKA

SEQ ID NO: 9103 - protein, 12 aa, Artificial
  helical interface sequence
IRSLIHHIGLAL

SEQ ID NO: 9104 - protein, 6 aa, Artificial
  helical interface sequence
CEDIAR

SEQ ID NO: 9105 - protein, 27 aa, Artificial
  helical interface sequence
PAVDYSLAAALTLHGHWGLGQVITDYV

SEQ ID NO: 9106 - protein, 10 aa, Artificial
  helical interface sequence
LKDYEDQQKQ

SEQ ID NO: 9107 - protein, 9 aa, Artificial
  helical interface sequence
AEEMYDIFG

SEQ ID NO: 9108 - protein, 8 aa, Artificial
  helical interface sequence
LDESCKIL

SEQ ID NO: 9109 - protein, 8 aa, Artificial
  helical interface sequence
LDESCKIL

SEQ ID NO: 9110 - protein, 5 aa, Artificial
  helical interface sequence
PHHER

SEQ ID NO: 9111 - protein, 5 aa, Artificial
  helical interface sequence
ILKVA

SEQ ID NO: 9112 - protein, 10 aa, Artificial
  helical interface sequence
FALMEKLKSE

SEQ ID NO: 9113 - protein, 14 aa, Artificial
  helical interface sequence
RSTVAQLVQTLEQH

SEQ ID NO: 9114 - protein, 16 aa, Artificial
  helical interface sequence
FQESALIADKLLSVMK

SEQ ID NO: 9115 - protein, 15 aa, Artificial
  helical interface sequence
LSKQAVAYRQLSLLL

SEQ ID NO: 9116 - protein, 12 aa, Artificial
  helical interface sequence
DKVLRDLMMLSD

SEQ ID NO: 9117 - protein, 6 aa, Artificial
  helical interface sequence
EEFGRF

SEQ ID NO: 9118 - protein, 32 aa, Artificial; identical to SEQ ID NO: 6965
  helical interface sequence

SEQ ID NO: 9119 - protein, 9 aa, Artificial
  helical interface sequence
RPDAEYWNS

SEQ ID NO: 9120 - protein, 17 aa, Artificial
  helical interface sequence
YLHRMTTLFCINVLSEV

SEQ ID NO: 9121 - protein, 13 aa, Artificial
  helical interface sequence
HETRELTRMNLQT

SEQ ID NO: 9122 - protein, 13 aa, Artificial
  helical interface sequence
SVPKSFFDDARSA

SEQ ID NO: 9123 - protein, 12 aa, Artificial
  helical interface sequence
PKDIQLARRIRG

SEQ ID NO: 9124 - protein, 11 aa, Artificial
  helical interface sequence
WMCYKNAMELG

SEQ ID NO: 9125 - protein, 12 aa, Artificial
  helical interface sequence
WIIKKGFAEMFK

SEQ ID NO: 9126 - protein, 9 aa, Artificial
  helical interface sequence
RELYIHRIG

SEQ ID NO: 9127 - protein, 10 aa, Artificial
  helical interface sequence
LSDIIEKETG

SEQ ID NO: 9128 - protein, 24 aa, Artificial
  helical interface sequence
HTAWWFLSAIWLWMVLGFIRPILM

SEQ ID NO: 9129 - protein, 14 aa, Artificial
  helical interface sequence
RSTVAQLVKRLTDA

SEQ ID NO: 9130 - protein, 26 aa, Artificial
  helical interface sequence
DKAKESIRAKCVQYLDRAEKLKDYLR

SEQ ID NO: 9131 - protein, 23 aa, Artificial
  helical interface sequence
LAVSKNKALQAIELQLTLETIYN

SEQ ID NO: 9132 - protein, 7 aa, Artificial
  helical interface sequence
EEQEREG

SEQ ID NO: 9133 - protein, 23 aa, Artificial
  helical interface sequence
VQEVEMLREKIYGVLEEYTRTTH

SEQ ID NO: 9134 - protein, 14 aa, Artificial
  helical interface sequence
ANVRFNVAKSLQKI

SEQ ID NO: 9135 - protein, 12 aa, Artificial
  helical interface sequence
EDTFKQIYAQFF

SEQ ID NO: 9136 - protein, 12 aa, Artificial
  helical interface sequence
SREIQTAVRLLL

SEQ ID NO: 9137 - protein, 6 aa, Artificial
  helical interface sequence
DEQLKS

SEQ ID NO: 9138 - protein, 11 aa, Artificial
  helical interface sequence
YREVQRIRHEF

SEQ ID NO: 9139 - protein, 11 aa, Artificial
  helical interface sequence
VDAKIAKLMGE

SEQ ID NO: 9140 - protein, 11 aa, Artificial
  helical interface sequence
ETIRNAFGMFD

SEQ ID NO: 9141 - protein, 14 aa, Artificial
  helical interface sequence
LKTVFDEAIRAVLG

SEQ ID NO: 9142 - protein, 13 aa, Artificial
  helical interface sequence
WYIEALAQVFSER

SEQ ID NO: 9143 - protein, 5 aa, Artificial
  helical interface sequence
LEDVS

SEQ ID NO: 9144 - protein, 7 aa, Artificial
  helical interface sequence
NEVFISL

SEQ ID NO: 9145 - protein, 8 aa, Artificial
  helical interface sequence
PDEIRKMS

SEQ ID NO: 9146 - protein, 16 aa, Artificial
  helical interface sequence
RYEIARVISARALQLA

SEQ ID NO: 9147 - protein, 14 aa, Artificial
  helical interface sequence
LGLYNEAVKIIHDF

SEQ ID NO: 9148 - protein, 7 aa, Artificial
  helical interface sequence
PEFAQLR

SEQ ID NO: 9149 - protein, 7 aa, Artificial
  helical interface sequence
LWLAINL

SEQ ID NO: 9150 - protein, 6 aa, Artificial
  helical interface sequence
SDFQCR

SEQ ID NO: 9151 - protein, 19 aa, Artificial
  helical interface sequence
AYPFLHLTTKLIMELAVNS

SEQ ID NO: 9152 - protein, 19 aa, Artificial
  helical interface sequence
AYPFLHLTTKLIMELAVNS

SEQ ID NO: 9153 - protein, 5 aa, Artificial
  helical interface sequence
EMDDF

SEQ ID NO: 9154 - protein, 14 aa, Artificial
  helical interface sequence
DEVVQLANRLQMEL

SEQ ID NO: 9155 - protein, 8 aa, Artificial
  helical interface sequence
FMDVYQRS

SEQ ID NO: 9156 - protein, 16 aa, Artificial
  helical interface sequence
TGRLFFEFYRLLHDAR

SEQ ID NO: 9157 - protein, 13 aa, Artificial
  helical interface sequence
PWQAFRLVLLPLS

SEQ ID NO: 9158 - protein, 5 aa, Artificial
  helical interface sequence
WLDYF

SEQ ID NO: 9159 - protein, 12 aa, Artificial
  helical interface sequence
GEYRRRWKREVL

SEQ ID NO: 9160 - protein, 17 aa, Artificial
  helical interface sequence
VDETLRLVQAFQFTDKH

SEQ ID NO: 9161 - protein, 7 aa, Artificial
  helical interface sequence
MESVEAA

SEQ ID NO: 9162 - protein, 13 aa, Artificial
  helical interface sequence
VAQIDALSQMVAE

SEQ ID NO: 9163 - protein, 13 aa, Artificial
  helical interface sequence
VAQIDALSQMVAE

SEQ ID NO: 9164 - protein, 5 aa, Artificial
  helical interface sequence
LKHWD

SEQ ID NO: 9165 - protein, 22 aa, Artificial
  helical interface sequence
AGEFEEALHTAALALVKDIASD

SEQ ID NO: 9166 - protein, 22 aa, Artificial
  helical interface sequence
AGEFEEALHTAALALVKDIASD

SEQ ID NO: 9167 - protein, 9 aa, Artificial
  helical interface sequence
LGEWAERIG

SEQ ID NO: 9168 - protein, 10 aa, Artificial
  helical interface sequence
RSERKKWIHC

SEQ ID NO: 9169 - protein, 6 aa, Artificial
  helical interface sequence
SEQLTS

SEQ ID NO: 9170 - protein, 15 aa, Artificial
  helical interface sequence
LSKQAVAYRQMSLLL

SEQ ID NO: 9171 - protein, 7 aa, Artificial
  helical interface sequence
LAVAVAA

SEQ ID NO: 9172 - protein, 18 aa, Artificial
  helical interface sequence
DSVKQSAALCLLRLYRTS

SEQ ID NO: 9173 - protein, 14 aa, Artificial
  helical interface sequence
QTKVLKQLLMLQSL

SEQ ID NO: 9174 - protein, 12 aa, Artificial
  helical interface sequence
FVLIYELLDEIL

SEQ ID NO: 9175 - protein, 8 aa, Artificial
  helical interface sequence
VDRMYGTI

SEQ ID NO: 9176 - protein, 8 aa, Artificial
  helical interface sequence
LREVNRTF

SEQ ID NO: 9177 - protein, 13 aa, Artificial
  helical interface sequence
TEMANKAAEAVLK

SEQ ID NO: 9178 - protein, 10 aa, Artificial
  helical interface sequence
ETAYGLLTAE

SEQ ID NO: 9179 - protein, 11 aa, Artificial
  helical interface sequence
NACGLFLKLHG

SEQ ID NO: 9180 - protein, 6 aa, Artificial
  helical interface sequence
DEQLKS

SEQ ID NO: 9181 - protein, 19 aa, Artificial
  helical interface sequence
PAVHASLDKFLASVSTVLT

SEQ ID NO: 9182 - protein, 19 aa, Artificial
  helical interface sequence
PAVHASLDKFLASVSTVLT

SEQ ID NO: 9183 - protein, 16 aa, Artificial
  helical interface sequence
IGIVAAQSVGEPGTQL

SEQ ID NO: 9184 - protein, 8 aa, Artificial
  helical interface sequence
HLLDAAAR

SEQ ID NO: 9185 - protein, 11 aa, Artificial
  helical interface sequence
EMERDCLIGFG

SEQ ID NO: 9186 - protein, 12 aa, Artificial
  helical interface sequence
YCRHNYGVVESF

SEQ ID NO: 9187 - protein, 26 aa, Artificial
  helical interface sequence
VETQVAELIGTNAIAPFLLTMSFAQR

SEQ ID NO: 9188 - protein, 14 aa, Artificial
  helical interface sequence
DFRRLWIVRINAAC

SEQ ID NO: 9189 - protein, 15 aa, Artificial
  helical interface sequence
TSTGKKVMASASSSS

SEQ ID NO: 9190 - protein, 10 aa, Artificial
  helical interface sequence
LARAHRAIHR

SEQ ID NO: 9191 - protein, 5 aa, Artificial
  helical interface sequence
SEQLT

SEQ ID NO: 9192 - protein, 6 aa, Artificial
  helical interface sequence
WDFAKD

SEQ ID NO: 9193 - protein, 23 aa, Artificial
  helical interface sequence
ELTWVSGVILAVITVSFGVTGYS

SEQ ID NO: 9194 - protein, 28 aa, Artificial
  helical interface sequence
PLLSGIVLGLIVVTLAGLFYAAYKQYKR

SEQ ID NO: 9195 - protein, 8 aa, Artificial
  helical interface sequence
FLIYPLGQ

SEQ ID NO: 9196 - protein, 18 aa, Artificial
  helical interface sequence
RTSLYLGLLLILVLALLF

SEQ ID NO: 9197 - protein, 9 aa, Artificial
  helical interface sequence
PEHAERAAH

SEQ ID NO: 9198 - protein, 6 aa, Artificial
  helical interface sequence
WTQRHF

SEQ ID NO: 9199 - protein, 19 aa, Artificial
  helical interface sequence
PANFKILSHNLLVVLAQQF

SEQ ID NO: 9200 - protein, 9 aa, Artificial
  helical interface sequence
CQLHQVIVA

SEQ ID NO: 9201 - protein, 8 aa, Artificial
  helical interface sequence
PPLAFERI

SEQ ID NO: 9202 - protein, 23 aa, Artificial
  helical interface sequence
QEIYNSNNQKIVNLKEKVAQLEA

SEQ ID NO: 9203 - protein, 12 aa, Artificial
  helical interface sequence
IFRFLLFFQGFH

SEQ ID NO: 9204 - protein, 13 aa, Artificial
  helical interface sequence
AKALQIIKLAELY

SEQ ID NO: 9205 - protein, 22 aa, Artificial
  helical interface sequence
AQGALANIAVDKANLEIMTKRS

SEQ ID NO: 9206 - protein, 10 aa, Artificial
  helical interface sequence
RPDAEYWNSQ

SEQ ID NO: 9207 - protein, 10 aa, Artificial
  helical interface sequence
RPDAEYWNSQ

SEQ ID NO: 9208 - protein, 9 aa, Artificial
  helical interface sequence
WERFFELTG

SEQ ID NO: 9209 - protein, 22 aa, Artificial
  helical interface sequence
VGDAQVLVRYMKAELELYRLQR

SEQ ID NO: 9210 - protein, 26 aa, Artificial
  helical interface sequence
DACIDQCLAKYMRSWNVISKAYISRI

SEQ ID NO: 9211 - protein, 7 aa, Artificial
  helical interface sequence
LPGLFDG

SEQ ID NO: 9212 - protein, 24 aa, Artificial
  helical interface sequence
LEDQKKIKRRLETLLRNIDNSDKA

SEQ ID NO: 9213 - protein, 33 aa, Artificial
  helical interface sequence
KGRSYAYFMVGAMGLLSSAGAKSTVETFISSMT

SEQ ID NO: 9214 - protein, 27 aa, Artificial
  helical interface sequence
VGTIFAGAFVFQTVFDTAITSWYENHN

SEQ ID NO: 9215 - protein, 6 aa, Artificial
  helical interface sequence
PWTQRF

SEQ ID NO: 9216 - protein, 6 aa, Artificial
  helical interface sequence
SEELQA

SEQ ID NO: 9217 - protein, 19 aa, Artificial
  helical interface sequence
PVNFKLLGHCFLVVVAVHF

SEQ ID NO: 9218 - protein, 20 aa, Artificial
  helical interface sequence
PEHVIGVTVAFVIIEAILTY

SEQ ID NO: 9219 - protein, 8 aa, Artificial
  helical interface sequence
LLTILKKM

SEQ ID NO: 9220 - protein, 5 aa, Artificial
  helical interface sequence
IRYRT

SEQ ID NO: 9221 - protein, 6 aa, Artificial
  helical interface sequence
ELLPFL

SEQ ID NO: 9222 - protein, 10 aa, Artificial
  helical interface sequence
IGCIVRVLNS

SEQ ID NO: 9223 - protein, 10 aa, Artificial
  helical interface sequence
IGCIVRVLNS

SEQ ID NO: 9224 - protein, 9 aa, Artificial
  helical interface sequence
QEGSQFVKG

SEQ ID NO: 9225 - protein, 12 aa, Artificial
  helical interface sequence
AYGSLFNSIQGL

SEQ ID NO: 9226 - protein, 7 aa, Artificial
  helical interface sequence
YADFIAS

SEQ ID NO: 9227 - protein, 5 aa, Artificial
  helical interface sequence
DFIAS

SEQ ID NO: 9228 - protein, 14 aa, Artificial
  helical interface sequence
FEKPFLWLARKLIG

SEQ ID NO: 9229 - protein, 15 aa, Artificial
  helical interface sequence
LAQQAHSNRKLMEII

SEQ ID NO: 9230 - protein, 18 aa, Artificial
  helical interface sequence
WPSVQQGLQQSFLHTLDS

SEQ ID NO: 9231 - protein, 5 aa, Artificial
  helical interface sequence
YENAN

SEQ ID NO: 9232 - protein, 15 aa, Artificial
  helical interface sequence
VKEVMHYLGQYIMVK

SEQ ID NO: 9233 - protein, 10 aa, Artificial
  helical interface sequence
SPLYDMLRKN

SEQ ID NO: 9234 - protein, 16 aa, Artificial
  helical interface sequence
AQVPLGAGIALACKYN

SEQ ID NO: 9235 - protein, 8 aa, Artificial
  helical interface sequence
LATLEPLV

SEQ ID NO: 9236 - protein, 18 aa, Artificial
  helical interface sequence
LRAISKQAEDYLYYKHVN

SEQ ID NO: 9237 - protein, 10 aa, Artificial
  helical interface sequence
TEMITTLKKI

SEQ ID NO: 9238 - protein, 19 aa, Artificial
  helical interface sequence
QKARLFITHLLLLLFIAAI

SEQ ID NO: 9239 - protein, 14 aa, Artificial
  helical interface sequence
RSTVAQLVQTLEQH

SEQ ID NO: 9240 - protein, 22 aa, Artificial
  helical interface sequence
KESTQKAIDGVTNKVNSIIDKM

SEQ ID NO: 9241 - protein, 16 aa, Artificial
  helical interface sequence
NYELISNELKARLLQE

SEQ ID NO: 9242 - protein, 11 aa, Artificial
  helical interface sequence
TNETTKSIERG

SEQ ID NO: 9243 - protein, 6 aa, Artificial
  helical interface sequence
VFHRKK

SEQ ID NO: 9244 - protein, 15 aa, Artificial
  helical interface sequence
RRMGVEMTLLRALAF

SEQ ID NO: 9245 - protein, 7 aa, Artificial
  helical interface sequence
QSSIDRG

SEQ ID NO: 9246 - protein, 13 aa, Artificial
  helical interface sequence
IFEMYARTRDEGF

SEQ ID NO: 9247 - protein, 9 aa, Artificial
  helical interface sequence
GEIARREFR

SEQ ID NO: 9248 - protein, 10 aa, Artificial
  helical interface sequence
HFNEVFISLW

SEQ ID NO: 9249 - protein, 16 aa, Artificial
  helical interface sequence
PAAQAAFQKVVAGVAT

SEQ ID NO: 9250 - protein, 6 aa, Artificial
  helical interface sequence
GSDIAG

SEQ ID NO: 9251 - protein, 9 aa, Artificial
  helical interface sequence
PRKVLSEMG

SEQ ID NO: 9252 - protein, 8 aa, Artificial
  helical interface sequence
IRETMKEK

SEQ ID NO: 9253 - protein, 10 aa, Artificial
  helical interface sequence
LWQFLLELLT

SEQ ID NO: 9254 - protein, 14 aa, Artificial
  helical interface sequence
AESEKEWKEWLKTS

SEQ ID NO: 9255 - protein, 12 aa, Artificial
  helical interface sequence
IVTKSIVNADAE

SEQ ID NO: 9256 - protein, 8 aa, Artificial
  helical interface sequence
FSSVTHIC

SEQ ID NO: 9257 - protein, 20 aa, Artificial
  helical interface sequence
ENLYDDRVFRIKRALDLSMR

SEQ ID NO: 9258 - protein, 6 aa, Artificial
  helical interface sequence
SEQLTS

SEQ ID NO: 9259 - protein, 23 aa, Artificial
  helical interface sequence
AQGALANIAVDKANLEIMTKRSN

SEQ ID NO: 9260 - protein, 12 aa, Artificial
  helical interface sequence
SVWIGGSILASL

SEQ ID NO: 9261 - protein, 14 aa, Artificial
  helical interface sequence
AVGNKILDHAFTNA

SEQ ID NO: 9262 - protein, 9 aa, Artificial
  helical interface sequence
YEEFVQMMT

SEQ ID NO: 9263 - protein, 13 aa, Artificial
  helical interface sequence
ASNEFLNIWGGQY

SEQ ID NO: 9264 - protein, 8 aa, Artificial
  helical interface sequence
RQVSDLTF

SEQ ID NO: 9265 - protein, 11 aa, Artificial
  helical interface sequence
KKWIQKVIDQF

SEQ ID NO: 9266 - protein, 8 aa, Artificial
  helical interface sequence
QEICEYFA

SEQ ID NO: 9267 - protein, 9 aa, Artificial
  helical interface sequence
QEICEYFAG

SEQ ID NO: 9268 - protein, 10 aa, Artificial
  helical interface sequence
PSVRKYAREK

SEQ ID NO: 9269 - protein, 14 aa, Artificial
  helical interface sequence
EKQAYRLDEALWAR

SEQ ID NO: 9270 - protein, 10 aa, Artificial
  helical interface sequence
PRHLQLAIRN

SEQ ID NO: 9271 - protein, 12 aa, Artificial
  helical interface sequence
SEHENTFFRDIV

SEQ ID NO: 9272 - protein, 12 aa, Artificial
  helical interface sequence
VITTVISAADSA

SEQ ID NO: 9273 - protein, 12 aa, Artificial
  helical interface sequence
PKDIQLARRIRG

SEQ ID NO: 9274 - protein, 28 aa, Artificial
  helical interface sequence
LQSLFDRATTVANYNSKLAGEMVNRFDE

SEQ ID NO: 9275 - protein, 9 aa, Artificial
  helical interface sequence
QKRFAERIL

SEQ ID NO: 9276 - protein, 10 aa, Artificial
  helical interface sequence
TSCLTSWQES

SEQ ID NO: 9277 - protein, 9 aa, Artificial
  helical interface sequence
LLAYLRRKL

SEQ ID NO: 9278 - protein, 7 aa, Artificial
  helical interface sequence
SEQLTSG

SEQ ID NO: 9279 - protein, 23 aa, Artificial
  helical interface sequence
AGDTVQFAEYIQANIQLYSIRED

SEQ ID NO: 9280 - protein, 8 aa, Artificial
  helical interface sequence
PEEIRKTF

SEQ ID NO: 9281 - protein, 8 aa, Artificial
  helical interface sequence
KRWYRLAS

SEQ ID NO: 9282 - protein, 14 aa, Artificial
  helical interface sequence
FGAHMANPLLRKVV

SEQ ID NO: 9283 - protein, 9 aa, Artificial
  helical interface sequence
PWEQHAKWY

SEQ ID NO: 9284 - protein, 19 aa, Artificial
  helical interface sequence
PQNFPMLSECIIVTLATHL

SEQ ID NO: 9285 - protein, 12 aa, Artificial
  helical interface sequence
PLTEAVSVADSQ

SEQ ID NO: 9286 - protein, 13 aa, Artificial
  helical interface sequence
TAQIDALSQMVAE

SEQ ID NO: 9287 - protein, 17 aa, Artificial
  helical interface sequence
DAAVEANSYLDYAINAL

SEQ ID NO: 9288 - protein, 13 aa, Artificial
  helical interface sequence
TAQIDALSQMVAE

SEQ ID NO: 9289 - protein, 9 aa, Artificial
  helical interface sequence
PYVRSRAYL

SEQ ID NO: 9290 - protein, 5 aa, Artificial
  helical interface sequence
EEFAK

SEQ ID NO: 9291 - protein, 9 aa, Artificial
  helical interface sequence
RPDAENWNS

SEQ ID NO: 9292 - protein, 8 aa, Artificial
  helical interface sequence
HADYLLRT

SEQ ID NO: 9293 - protein, 19 aa, Artificial
  helical interface sequence
PIRLGLALNFSVFYYEILN

SEQ ID NO: 9294 - protein, 8 aa, Artificial
  helical interface sequence
ELDAKLNK

SEQ ID NO: 9295 - protein, 30 aa, Artificial
  helical interface sequence
SEQAEELHKHVIDGTRVFLVIAAIAHFLAF

SEQ ID NO: 9296 - protein, 30 aa, Artificial; identical to SEQ ID NO: 9295
  helical interface sequence

SEQ ID NO: 9297 - protein, 30 aa, Artificial; identical to SEQ ID NO: 9295
  helical interface sequence

SEQ ID NO: 9298 - protein, 21 aa, Artificial
  helical interface sequence
NAPGAAANRVALEACTQARNE

SEQ ID NO: 9299 - protein, 21 aa, Artificial
  helical interface sequence
NAPGAAANRVALEACTQARNE

SEQ ID NO: 9300 - protein, 22 aa, Artificial
  helical interface sequence
ATDVQTVAQRLKFRLNLYELKE

SEQ ID NO: 9301 - protein, 23 aa, Artificial
  helical interface sequence
AADTDMTTQLISSNLELHSLSTG

SEQ ID NO: 9302 - protein, 15 aa, Artificial
  helical interface sequence
GKNYGRVVYEALKGG

SEQ ID NO: 9303 - protein, 10 aa, Artificial
  helical interface sequence
WDDAERFCTE

SEQ ID NO: 9304 - protein, 10 aa, Artificial
  helical interface sequence
VFAQFIQAAH

SEQ ID NO: 9305 - protein, 11 aa, Artificial
  helical interface sequence
SGQKRFERYSQ

SEQ ID NO: 9306 - protein, 13 aa, Artificial
  helical interface sequence
GQIDYALTAVKQG

SEQ ID NO: 9307 - protein, 13 aa, Artificial
  helical interface sequence
VGELFWKVKEEEG

SEQ ID NO: 9308 - protein, 22 aa, Artificial
  helical interface sequence
AADTEAVTQLIGSNIELHSLYT

SEQ ID NO: 9309 - protein, 22 aa, Artificial
  helical interface sequence
AGDTVQFAEYIQANIQLYSIRE

SEQ ID NO: 9310 - protein, 5 aa, Artificial
  helical interface sequence
EEALK

SEQ ID NO: 9311 - protein, 15 aa, Artificial
  helical interface sequence
RRMGVEMTLLRALAF

SEQ ID NO: 9312 - protein, 6 aa, Artificial
  helical interface sequence
YCSEVC

SEQ ID NO: 9313 - protein, 15 aa, Artificial
  helical interface sequence
EPVFWGLFGAGGMWS

SEQ ID NO: 9314 - protein, 9 aa, Artificial
  helical interface sequence
CQLHQVIVA

SEQ ID NO: 9315 - protein, 5 aa, Artificial
  helical interface sequence
RTASV

SEQ ID NO: 9316 - protein, 20 aa, Artificial
  helical interface sequence
EDESYARAYRIIRAHQTELT

SEQ ID NO: 9317 - protein, 20 aa, Artificial
  helical interface sequence
DTEVERAKSLLKLQLGQLYE

SEQ ID NO: 9318 - protein, 19 aa, Artificial
  helical interface sequence
NEFTTHILEVINAHMVLSK

SEQ ID NO: 9319 - protein, 10 aa, Artificial
  helical interface sequence
HSVIGFIQRM

SEQ ID NO: 9320 - protein, 7 aa, Artificial
  helical interface sequence
GKALLLL

SEQ ID NO: 9321 - protein, 6 aa, Artificial
  helical interface sequence
MQQVEN

SEQ ID NO: 9322 - protein, 12 aa, Artificial
  helical interface sequence
QQLTLLQHNIKT

SEQ ID NO: 9323 - protein, 12 aa, Artificial
  helical interface sequence
QQLTLLQHNIKT

SEQ ID NO: 9324 - protein, 15 aa, Artificial
  helical interface sequence
GYDNIQKHLTQASSI

SEQ ID NO: 9325 - protein, 10 aa, Artificial
  helical interface sequence
LDDQMTLLQY

SEQ ID NO: 9326 - protein, 6 aa, Artificial
  helical interface sequence
LESIEQ

SEQ ID NO: 9327 - protein, 5 aa, Artificial
  helical interface sequence
IHKKM

SEQ ID NO: 9328 - protein, 7 aa, Artificial
  helical interface sequence
SSVGRDC

SEQ ID NO: 9329 - protein, 30 aa, Artificial
  helical interface sequence
PVNLVFSAIRVALADYTGEHIATDFSDILF

SEQ ID NO: 9330 - protein, 30 aa, Artificial; identical to SEQ ID NO: 9329
  helical interface sequence

SEQ ID NO: 9331 - protein, 30 aa, Artificial; identical to SEQ ID NO: 2910
  helical interface sequence

SEQ ID NO: 9332 - protein, 22 aa, Artificial
  helical interface sequence
PVTNICQAADKQLFTLVEWAKR

SEQ ID NO: 9333 - protein, 14 aa, Artificial
  helical interface sequence
YTVWHFRRVLLRSL

SEQ ID NO: 9334 - protein, 9 aa, Artificial
  helical interface sequence
ALQEGFRMM

SEQ ID NO: 9335 - protein, 11 aa, Artificial
  helical interface sequence
RYVAADAIELV

SEQ ID NO: 9336 - protein, 6 aa, Artificial
  helical interface sequence
RMENLS

SEQ ID NO: 9337 - protein, 20 aa, Artificial
  helical interface sequence
THDSSIRYLQEIYNSNNQKI

SEQ ID NO: 9338 - protein, 6 aa, Artificial
  helical interface sequence
SEQLTS

SEQ ID NO: 9339 - protein, 12 aa, Artificial
  helical interface sequence
LLEWACVLFHTS

SEQ ID NO: 9340 - protein, 12 aa, Artificial
  helical interface sequence
YGWGIAKELSKR

SEQ ID NO: 9341 - protein, 34 aa, Artificial; identical to SEQ ID NO: 2403
  helical interface sequence

SEQ ID NO: 9342 - protein, 22 aa, Artificial
  helical interface sequence
VGDAQVLVRYMKAELELYRLQR

SEQ ID NO: 9343 - protein, 5 aa, Artificial
  helical interface sequence
LRFMA

SEQ ID NO: 9344 - protein, 17 aa, Artificial
  helical interface sequence
TWFDTMLGFAISAYALK

SEQ ID NO: 9345 - protein, 5 aa, Artificial
  helical interface sequence
LHAAK

SEQ ID NO: 9346 - protein, 5 aa, Artificial
  helical interface sequence
YEDRF

SEQ ID NO: 9347 - protein, 13 aa, Artificial
  helical interface sequence
VERIKERVEEKEG

SEQ ID NO: 9348 - protein, 9 aa, Artificial
  helical interface sequence
RPDAENWNS

SEQ ID NO: 9349 - protein, 14 aa, Artificial
  helical interface sequence
EELLRNLYDSIRNE

SEQ ID NO: 9350 - protein, 15 aa, Artificial
  helical interface sequence
RERIRQIENKALRKL

SEQ ID NO: 9351 - protein, 8 aa, Artificial
  helical interface sequence
REETFIAH

SEQ ID NO: 9352 - protein, 14 aa, Artificial
  helical interface sequence
LEKKVKELKEKIEK

SEQ ID NO: 9353 - protein, 18 aa, Artificial
  helical interface sequence
CDVLAKRMANLSQIYTQR

SEQ ID NO: 9354 - protein, 16 aa, Artificial
  helical interface sequence
TKLLVSEVAKIMQEAT

SEQ ID NO: 9355 - protein, 13 aa, Artificial
  helical interface sequence
YSGFYTFSLLDHH

SEQ ID NO: 9356 - protein, 19 aa, Artificial
  helical interface sequence
VARKQQLIRDVIDVTNKSI

SEQ ID NO: 9357 - protein, 11 aa, Artificial
  helical interface sequence
LPFARAAAIGW

SEQ ID NO: 9358 - protein, 8 aa, Artificial
  helical interface sequence
RKLAVNMV

SEQ ID NO: 9359 - protein, 21 aa, Artificial
  helical interface sequence
VKYRRRVLLAISRKVVDQLWE

SEQ ID NO: 9360 - protein, 8 aa, Artificial
  helical interface sequence
REETFIAH

SEQ ID NO: 9361 - protein, 6 aa, Artificial
  helical interface sequence
GPCKMI

SEQ ID NO: 9362 - protein, 5 aa, Artificial
  helical interface sequence
YRHLV

SEQ ID NO: 9363 - protein, 7 aa, Artificial
  helical interface sequence
RQENFLG

SEQ ID NO: 9364 - protein, 7 aa, Artificial
  helical interface sequence
RQENFLG

SEQ ID NO: 9365 - protein, 5 aa, Artificial
  helical interface sequence
LSQIT

SEQ ID NO: 9366 - protein, 18 aa, Artificial
  helical interface sequence
DSVLFYAITTLHNLLLHQ

SEQ ID NO: 9367 - protein, 6 aa, Artificial
  helical interface sequence
HTARLV

SEQ ID NO: 9368 - protein, 8 aa, Artificial
  helical interface sequence
PAVKRLFD

SEQ ID NO: 9369 - protein, 9 aa, Artificial
  helical interface sequence
PTAYSYTSH

SEQ ID NO: 9370 - protein, 11 aa, Artificial
  helical interface sequence
SVMPAEVAWAV

SEQ ID NO: 9371 - protein, 14 aa, Artificial
  helical interface sequence
LVPSYAEKEAKISR

SEQ ID NO: 9372 - protein, 10 aa, Artificial
  helical interface sequence
PRHILLAVAN

SEQ ID NO: 9373 - protein, 29 aa, Artificial
  helical interface sequence
SKAMGIMNSFVNDIFERIASEASRLAHYN

SEQ ID NO: 9374 - protein, 11 aa, Artificial
  helical interface sequence
SIYVYKVLKQV

SEQ ID NO: 9375 - protein, 6 aa, Artificial
  helical interface sequence
VQAWIR

SEQ ID NO: 9376 - protein, 21 aa, Artificial
  helical interface sequence
NAPGAAANRVALEACTQARNE

SEQ ID NO: 9377 - protein, 14 aa, Artificial
  helical interface sequence
DEQIAAQVDYIVAN

SEQ ID NO: 9378 - protein, 5 aa, Artificial
  helical interface sequence
FHDKY

SEQ ID NO: 9379 - protein, 13 aa, Artificial
  helical interface sequence
NEKLSMFYETLKS

SEQ ID NO: 9380 - protein, 10 aa, Artificial
  helical interface sequence
FAHAVFALLF

SEQ ID NO: 9381 - protein, 8 aa, Artificial
  helical interface sequence
YNPIYRAG

SEQ ID NO: 9382 - protein, 12 aa, Artificial
  helical interface sequence
EEEIAELLELAR

SEQ ID NO: 9383 - protein, 9 aa, Artificial
  helical interface sequence
FLDVYQRSA

SEQ ID NO: 9384 - protein, 11 aa, Artificial
  helical interface sequence
PEAVRRALAER

SEQ ID NO: 9385 - protein, 14 aa, Artificial
  helical interface sequence
PEYRAVLRAYLEAV

SEQ ID NO: 9386 - protein, 10 aa, Artificial
  helical interface sequence
LAPLLENISA

SEQ ID NO: 9387 - protein, 9 aa, Artificial
  helical interface sequence
DRLRPLSYP

SEQ ID NO: 9388 - protein, 18 aa, Artificial
  helical interface sequence
TKSFEDIHQYREQIKRVK

SEQ ID NO: 9389 - protein, 5 aa, Artificial
  helical interface sequence
AFSLF

SEQ ID NO: 9390 - protein, 7 aa, Artificial
  helical interface sequence
KEAFSLF

SEQ ID NO: 9391 - protein, 7 aa, Artificial
  helical interface sequence
KEAFSLF

SEQ ID NO: 9392 - protein, 6 aa, Artificial
  helical interface sequence
SEQLTS

SEQ ID NO: 9393 - protein, 23 aa, Artificial
  helical interface sequence
PAEVEALREKVYASLEAYCKHKY

SEQ ID NO: 9394 - protein, 18 aa, Artificial
  helical interface sequence
KRAVRRLRTACERAKRTL

SEQ ID NO: 9395 - protein, 20 aa, Artificial
  helical interface sequence
ELIESARKVSEKVSHVLAAL

SEQ ID NO: 9396 - protein, 9 aa, Artificial
  helical interface sequence
DTFWDYVSL

SEQ ID NO: 9397 - protein, 13 aa, Artificial
  helical interface sequence
FHRRELWEAIEAG

SEQ ID NO: 9398 - protein, 9 aa, Artificial
  helical interface sequence
DTFWDYVSL

SEQ ID NO: 9399 - protein, 20 aa, Artificial
  helical interface sequence
NEFKAHCIRVVNGLDSSIGL

SEQ ID NO: 9400 - protein, 9 aa, Artificial
  helical interface sequence
AAVVLHRLM

SEQ ID NO: 9401 - protein, 19 aa, Artificial
  helical interface sequence
VEDALYLGKRSILAAAHRD

SEQ ID NO: 9402 - protein, 12 aa, Artificial
  helical interface sequence
PKDIQLARRIRG

SEQ ID NO: 9403 - protein, 16 aa, Artificial
  helical interface sequence
KNIARHLAQVGDSMDR

SEQ ID NO: 9404 - protein, 20 aa, Artificial
  helical interface sequence
LKGRLTSLESQFINALDILE

SEQ ID NO: 9405 - protein, 12 aa, Artificial
  helical interface sequence
EESWDDYLYWQE

SEQ ID NO: 9406 - protein, 19 aa, Artificial
  helical interface sequence
GEVQAAFQKFMAVVVSSLG

SEQ ID NO: 9407 - protein, 6 aa, Artificial
  helical interface sequence
PWTQRY

SEQ ID NO: 9408 - protein, 19 aa, Artificial
  helical interface sequence
GEVQAAFQKFMAVVVSSLG

SEQ ID NO: 9409 - protein, 13 aa, Artificial
  helical interface sequence
QYIEGEMRTRIRY

SEQ ID NO: 9410 - protein, 7 aa, Artificial
  helical interface sequence
RFAKLLL

SEQ ID NO: 9411 - protein, 27 aa, Artificial
  helical interface sequence
GVHDFILVRATAIVLTLYIIYMVGFFA

SEQ ID NO: 9412 - protein, 7 aa, Artificial
  helical interface sequence
EAEISHT

SEQ ID NO: 9413 - protein, 24 aa, Artificial
  helical interface sequence
ETLKITVYIVVTFFVLLFVFGFLS

SEQ ID NO: 9414 - protein, 13 aa, Artificial
  helical interface sequence
IFRFLLFFQGFHN

SEQ ID NO: 9415 - protein, 17 aa, Artificial
  helical interface sequence
KYERARILGTRALQISM

SEQ ID NO: 9416 - protein, 7 aa, Artificial
  helical interface sequence
LIEKFLR

SEQ ID NO: 9417 - protein, 30 aa, Artificial; identical to SEQ ID NO: 4916
  helical interface sequence

SEQ ID NO: 9418 - protein, 11 aa, Artificial
  helical interface sequence
GENMSSATYVN

SEQ ID NO: 9419 - protein, 6 aa, Artificial
  helical interface sequence
RDCLIG

SEQ ID NO: 9420 - protein, 9 aa, Artificial
  helical interface sequence
AEERRRKQN

SEQ ID NO: 9421 - protein, 6 aa, Artificial
  helical interface sequence
LEDYVA

SEQ ID NO: 9422 - protein, 6 aa, Artificial
  helical interface sequence
RDCLIG

SEQ ID NO: 9423 - protein, 9 aa, Artificial
  helical interface sequence
AEERRRKQN

SEQ ID NO: 9424 - protein, 9 aa, Artificial
  helical interface sequence
IQALADDVT

SEQ ID NO: 9425 - protein, 37 aa, Artificial; identical to SEQ ID NO: 2853
  helical interface sequence

SEQ ID NO: 9426 - protein, 8 aa, Artificial
  helical interface sequence
HSLAPMYY

SEQ ID NO: 9427 - protein, 10 aa, Artificial
  helical interface sequence
PAARKLAREL

SEQ ID NO: 9428 - protein, 12 aa, Artificial
  helical interface sequence
PKDIQLARRIRG

SEQ ID NO: 9429 - protein, 12 aa, Artificial
  helical interface sequence
SREIQTAVRLLL

SEQ ID NO: 9430 - protein, 22 aa, Artificial
  helical interface sequence
GALTVLFGAIAYGEVTAAAATG

SEQ ID NO: 9431 - protein, 6 aa, Artificial
  helical interface sequence
KAAEER

SEQ ID NO: 9432 - protein, 6 aa, Artificial
  helical interface sequence
KAAEER

SEQ ID NO: 9433 - protein, 12 aa, Artificial
  helical interface sequence
SVWIGGSILASL

SEQ ID NO: 9434 - protein, 36 aa, Artificial
  helical interface sequence
SKCWREEYHKARQKQIQEDWELAERLQREEEEAFAS

SEQ ID NO: 9435 - protein, 52 aa, Artificial; identical to SEQ ID NO: 499
  helical interface sequence

SEQ ID NO: 9436 - protein, 32 aa, Artificial; identical to SEQ ID NO: 6008
  helical interface sequence

SEQ ID NO: 9437 - protein, 13 aa, Artificial
  helical interface sequence
PEALIYAVMQLQK

SEQ ID NO: 9438 - protein, 13 aa, Artificial
  helical interface sequence
PEALIYAVMQLQK

SEQ ID NO: 9439 - protein, 13 aa, Artificial
  helical interface sequence
PEALIYAVMQLQK

SEQ ID NO: 9440 - protein, 15 aa, Artificial
  helical interface sequence
VDLAFASVEHIMRNV

SEQ ID NO: 9441 - protein, 8 aa, Artificial
  helical interface sequence
KLFLEMLE

SEQ ID NO: 9442 - protein, 19 aa, Artificial
  helical interface sequence
PAFIAHADRVLGGLDIAIS

SEQ ID NO: 9443 - protein, 8 aa, Artificial
  helical interface sequence
LDESCKIL

SEQ ID NO: 9444 - protein, 8 aa, Artificial
  helical interface sequence
LDESCKIL

SEQ ID NO: 9445 - protein, 6 aa, Artificial
  helical interface sequence
SALIYY

SEQ ID NO: 9446 - protein, 11 aa, Artificial
  helical interface sequence
LFQFARLIDAK

SEQ ID NO: 9447 - protein, 32 aa, Artificial
  helical interface sequence
RWGSELEISMEQVSASIGNFTVDLFNKLNETN

SEQ ID NO: 9448 - protein, 17 aa, Artificial
  helical interface sequence
GGNYGPTVLVQQEALKR

SEQ ID NO: 9449 - protein, 15 aa, Artificial
  helical interface sequence
VRRAIKQAVQRVMES

SEQ ID NO: 9450 - protein, 12 aa, Artificial
  helical interface sequence
SREIQTAVRLLL

SEQ ID NO: 9451 - protein, 10 aa, Artificial
  helical interface sequence
LDQLNLVLRD

SEQ ID NO: 9452 - protein, 29 aa, Artificial
  helical interface sequence
SSAVMALQEASEAYLVALFEDTNLCAIHA

SEQ ID NO: 9453 - protein, 8 aa, Artificial
  helical interface sequence
HVDVFFQK

SEQ ID NO: 9454 - protein, 12 aa, Artificial
  helical interface sequence
DKVLRDLMMLSD

SEQ ID NO: 9455 - protein, 5 aa, Artificial
  helical interface sequence
FNLIY

SEQ ID NO: 9456 - protein, 8 aa, Artificial
  helical interface sequence
PEAFGVHG

SEQ ID NO: 9457 - protein, 21 aa, Artificial
  helical interface sequence
DAAQGKTRTLMEKDSYPRFLK

SEQ ID NO: 9458 - protein, 7 aa, Artificial
  helical interface sequence
PVHQIYQ

SEQ ID NO: 9459 - protein, 13 aa, Artificial
  helical interface sequence
RLGIGQYLSRIAL

SEQ ID NO: 9460 - protein, 14 aa, Artificial
  helical interface sequence
KRKVDWLTEKMREA

SEQ ID NO: 9461 - protein, 18 aa, Artificial
  helical interface sequence
LSDAYATFALMMSISDSL

SEQ ID NO: 9462 - protein, 15 aa, Artificial
  helical interface sequence
TREGNDLYHEMIESG

SEQ ID NO: 9463 - protein, 15 aa, Artificial
  helical interface sequence
TREGNDLYHEMIESG

SEQ ID NO: 9464 - protein, 7 aa, Artificial
  helical interface sequence
TLLGWFG

SEQ ID NO: 9465 - protein, 8 aa, Artificial
  helical interface sequence
KSDLVNNL

SEQ ID NO: 9466 - protein, 12 aa, Artificial
  helical interface sequence
RGLAVFISDIRN

SEQ ID NO: 9467 - protein, 12 aa, Artificial
  helical interface sequence
RGLAVFISDIRN

SEQ ID NO: 9468 - protein, 14 aa, Artificial
  helical interface sequence
YTEKQIGYLFISVL

SEQ ID NO: 9469 - protein, 10 aa, Artificial
  helical interface sequence
EELQEMIDEA

SEQ ID NO: 9470 - protein, 16 aa, Artificial
  helical interface sequence
IWIAQELRRIGDEFNA

SEQ ID NO: 9471 - protein, 17 aa, Artificial
  helical interface sequence
YLHRMTTLFCINVLSEV

SEQ ID NO: 9472 - protein, 14 aa, Artificial
  helical interface sequence
PLLRQAIELFDHQG

SEQ ID NO: 9473 - protein, 11 aa, Artificial
  helical interface sequence
STTMRRLIDTY

SEQ ID NO: 9474 - protein, 10 aa, Artificial
  helical interface sequence
ERVKRGMAEM

SEQ ID NO: 9475 - protein, 11 aa, Artificial
  helical interface sequence
STTMRRLIDTY

SEQ ID NO: 9476 - protein, 10 aa, Artificial
  helical interface sequence
ESLQFLLDTC

SEQ ID NO: 9477 - protein, 9 aa, Artificial
  helical interface sequence
FYDECLRKY

SEQ ID NO: 9478 - protein, 12 aa, Artificial
  helical interface sequence
AIYVYKVLKQVH

SEQ ID NO: 9479 - protein, 8 aa, Artificial
  helical interface sequence
IMGVMSLG

SEQ ID NO: 9480 - protein, 10 aa, Artificial
  helical interface sequence
IEDQISLLKG

SEQ ID NO: 9481 - protein, 21 aa, Artificial
  helical interface sequence
WGRIVAFFSFGGALCVESVDK

SEQ ID NO: 9482 - protein, 7 aa, Artificial
  helical interface sequence
VLEHVFS

SEQ ID NO: 9483 - protein, 15 aa, Artificial
  helical interface sequence
VADMLVKVNALIKDR

SEQ ID NO: 9484 - protein, 12 aa, Artificial
  helical interface sequence
KTTIHRIKQKEF

SEQ ID NO: 9485 - protein, 9 aa, Artificial
  helical interface sequence
FVAGRIREA

SEQ ID NO: 9486 - protein, 6 aa, Artificial
  helical interface sequence
KEWAHA

SEQ ID NO: 9487 - protein, 17 aa, Artificial
  helical interface sequence
ATLAAMKNFAEQYAKRT

SEQ ID NO: 9488 - protein, 38 aa, Artificial; identical to SEQ ID NO: 708
  helical interface sequence

SEQ ID NO: 9489 - protein, 13 aa, Artificial
  helical interface sequence
EEIVMHIPELADE

SEQ ID NO: 9490 - protein, 20 aa, Artificial
  helical interface sequence
GDVLYELLQHILKQRDLEAE

SEQ ID NO: 9491 - protein, 29 aa, Artificial
  helical interface sequence
GFMLRYLHANGASLFFIAVYLHIFRGLYY

SEQ ID NO: 9492 - protein, 15 aa, Artificial
  helical interface sequence
FSQVLDDLSARFILN

SEQ ID NO: 9493 - protein, 25 aa, Artificial
  helical interface sequence
RMKANARERNRMHGLNAALDNLRKV

SEQ ID NO: 9494 - protein, 15 aa, Artificial
  helical interface sequence
APEILLAVYRALQRA

SEQ ID NO: 9495 - protein, 14 aa, Artificial
  helical interface sequence
STAACLRRLFRAIF

SEQ ID NO: 9496 - protein, 12 aa, Artificial
  helical interface sequence
AYEALYATIQGH

SEQ ID NO: 9497 - protein, 12 aa, Artificial
  helical interface sequence
PLTDAVSTADSQ

SEQ ID NO: 9498 - protein, 13 aa, Artificial
  helical interface sequence
VAQIDALSQMVAE

SEQ ID NO: 9499 - protein, 17 aa, Artificial
  helical interface sequence
MELFRELVDQKMDAIKA

SEQ ID NO: 9500 - protein, 5 aa, Artificial
  helical interface sequence
SEQLT

SEQ ID NO: 9501 - protein, 15 aa, Artificial
  helical interface sequence
LSKQAVAYRQMSLLL

SEQ ID NO: 9502 - protein, 12 aa, Artificial
  helical interface sequence
VFYLHSRLLERA

SEQ ID NO: 9503 - protein, 13 aa, Artificial
  helical interface sequence
GAALDKLKAYFTT

SEQ ID NO: 9504 - protein, 12 aa, Artificial
  helical interface sequence
AFTKAIVAADLR

SEQ ID NO: 9505 - protein, 13 aa, Artificial
  helical interface sequence
QCALAVRKYANEV

SEQ ID NO: 9506 - protein, 64 aa, Artificial
  helical interface sequence
PEFMGREVENLILENTQLLETKNALNIVKNDLIAKVDELTCEKDVLQGELEAVKQAKLKLEEKN

SEQ ID NO: 9507 - protein, 5 aa, Artificial
  helical interface sequence
EEFGR

SEQ ID NO: 9508 - protein, 21 aa, Artificial
  helical interface sequence
TYYKRTIKISGQKAMYALKSK

SEQ ID NO: 9509 - protein, 19 aa, Artificial
  helical interface sequence
SPLQSFMETQMDAFQEKVK

SEQ ID NO: 9510 - protein, 17 aa, Artificial
  helical interface sequence
DECRARAGALDAVGGSL

SEQ ID NO: 9511 - protein, 6 aa, Artificial
  helical interface sequence
WDFAKD

SEQ ID NO: 9512 - protein, 19 aa, Artificial
  helical interface sequence
PVNFKLLGQCFLVVVAIHN

SEQ ID NO: 9513 - protein, 35 aa, Artificial; identical to SEQ ID NO: 2779
  helical interface sequence

SEQ ID NO: 9514 - protein, 9 aa, Artificial
  helical interface sequence
RPILQGFRT

SEQ ID NO: 9515 - protein, 9 aa, Artificial
  helical interface sequence
LSKLFTSLF

SEQ ID NO: 9516 - protein, 7 aa, Artificial
  helical interface sequence
WELSYRL

SEQ ID NO: 9517 - protein, 7 aa, Artificial
  helical interface sequence
LANNIKK

SEQ ID NO: 9518 - protein, 12 aa, Artificial
  helical interface sequence
PKDIQLARRIRG

SEQ ID NO: 9519 - protein, 7 aa, Artificial
  helical interface sequence
PEFGQLA

SEQ ID NO: 9520 - protein, 12 aa, Artificial
  helical interface sequence
TLELCYDLTMTY

SEQ ID NO: 9521 - protein, 11 aa, Artificial
  helical interface sequence
IDVALRLIYAL

SEQ ID NO: 9522 - protein, 15 aa, Artificial
  helical interface sequence
IEAVATLLSNMLNQV

SEQ ID NO: 9523 - protein, 22 aa, Artificial
  helical interface sequence
TVEERVINEEYKIWKKNTPFLY

SEQ ID NO: 9524 - protein, 12 aa, Artificial
  helical interface sequence
SVWIGGSILASL

SEQ ID NO: 9525 - protein, 16 aa, Artificial
  helical interface sequence
TELVNKISENCFEKCL

SEQ ID NO: 9526 - protein, 9 aa, Artificial
  helical interface sequence
PVGPALGQH

SEQ ID NO: 9527 - protein, 11 aa, Artificial
  helical interface sequence
DPILPGLFDGG

SEQ ID NO: 9528 - protein, 13 aa, Artificial
  helical interface sequence
ILNRKAIDFLLQR

SEQ ID NO: 9529 - protein, 15 aa, Artificial
  helical interface sequence
KEEALSQYRQIKQFT

SEQ ID NO: 9530 - protein, 16 aa, Artificial
  helical interface sequence
AGEYGAEALERTFCSF

SEQ ID NO: 9531 - protein, 11 aa, Artificial
  helical interface sequence
PRKVRLVVDLI

SEQ ID NO: 9532 - protein, 13 aa, Artificial
  helical interface sequence
IPKVYELVERAKG

SEQ ID NO: 9533 - protein, 11 aa, Artificial
  helical interface sequence
PRKVRLVVDLI

SEQ ID NO: 9534 - protein, 26 aa, Artificial
  helical interface sequence
HEDQIALLKGSAVEAMFLRSAEIFNK

SEQ ID NO: 9535 - protein, 19 aa, Artificial
  helical interface sequence
PVNFKLLGHCFLVVVAVHF

SEQ ID NO: 9536 - protein, 21 aa, Artificial
  helical interface sequence
FKEKLKWTGIVLVLYFIMGCI

SEQ ID NO: 9537 - protein, 28 aa, Artificial
  helical interface sequence
REYQMEGFAMFEHMIESIEDEVAKFVMK

SEQ ID NO: 9538 - protein, 10 aa, Artificial
  helical interface sequence
VEQMHEDIIS

SEQ ID NO: 9539 - protein, 10 aa, Artificial
  helical interface sequence
DIFDMLLTFT

SEQ ID NO: 9540 - protein, 15 aa, Artificial
  helical interface sequence
EEQTAEFKEAFQLFD

SEQ ID NO: 9541 - protein, 28 aa, Artificial
  helical interface sequence
EWAGKLHFWMMFVGANLTFFPQHFLGRQ

SEQ ID NO: 9542 - protein, 13 aa, Artificial
  helical interface sequence
WKRDLSKLFTSLF

SEQ ID NO: 9543 - protein, 29 aa, Artificial
  helical interface sequence
LFAKLLQKMTDLRQIVTEHVQLLQVIKKT

SEQ ID NO: 9544 - protein, 18 aa, Artificial
  helical interface sequence
KAVDWWALGVLIYEMAAG

SEQ ID NO: 9545 - protein, 12 aa, Artificial
  helical interface sequence
LAPLLENISARY

SEQ ID NO: 9546 - protein, 9 aa, Artificial
  helical interface sequence
RPILQGFRT

SEQ ID NO: 9547 - protein, 40 aa, Artificial
  helical interface sequence
LVFDLQSKLDRIISWGQQSIDLWIGYDRHVHKFIRTAIDM

SEQ ID NO: 9548 - protein, 9 aa, Artificial
  helical interface sequence
RELYIHRIG

SEQ ID NO: 9549 - protein, 11 aa, Artificial
  helical interface sequence
IRILRDIEQYY

SEQ ID NO: 9550 - protein, 5 aa, Artificial
  helical interface sequence
TYYMS

SEQ ID NO: 9551 - protein, 5 aa, Artificial
  helical interface sequence
PCFQI

SEQ ID NO: 9552 - protein, 5 aa, Artificial
  helical interface sequence
DGRLA

SEQ ID NO: 9553 - protein, 62 aa, Artificial
  helical interface sequence
LANQMLTAMAQGYAAEISARRNAMDNASKNAGDMINRYSILYNRTRQAVITNELVDIITGAS

SEQ ID NO: 9554 - protein, 11 aa, Artificial
  helical interface sequence
DEELRAMIEEF

SEQ ID NO: 9555 - protein, 10 aa, Artificial
  helical interface sequence
ENEFIAICTD

SEQ ID NO: 9556 - protein, 16 aa, Artificial
  helical interface sequence
FTQILSTVEPKALEMV

SEQ ID NO: 9557 - protein, 20 aa, Artificial
  helical interface sequence
DSTRETVLKQIREFLEEIVD

SEQ ID NO: 9558 - protein, 12 aa, Artificial
  helical interface sequence
DEEVDEMIREAD

SEQ ID NO: 9559 - protein, 8 aa, Artificial
  helical interface sequence
TLADQALH

SEQ ID NO: 9560 - protein, 20 aa, Artificial
  helical interface sequence
DEQNFIQNLSLFLCTFLKEH

SEQ ID NO: 9561 - protein, 20 aa, Artificial
  helical interface sequence
APARLHWLATLLMDALKRHH

SEQ ID NO: 9562 - protein, 14 aa, Artificial
  helical interface sequence
RRMGVEMTLLRALA

SEQ ID NO: 9563 - protein, 16 aa, Artificial
  helical interface sequence
YVTKRQSLKLLGELLL

SEQ ID NO: 9564 - protein, 11 aa, Artificial
  helical interface sequence
EMERDCMIAHG

SEQ ID NO: 9565 - protein, 12 aa, Artificial
  helical interface sequence
SNAILRYIARKH

SEQ ID NO: 9566 - protein, 6 aa, Artificial
  helical interface sequence
LYKMRT

SEQ ID NO: 9567 - protein, 6 aa, Artificial
  helical interface sequence
LYKMRT

SEQ ID NO: 9568 - protein, 11 aa, Artificial
  helical interface sequence
LDQVLNMLYWV

SEQ ID NO: 9569 - protein, 7 aa, Artificial
  helical interface sequence
LIEKFLR

SEQ ID NO: 9570 - protein, 7 aa, Artificial
  helical interface sequence
KRSLARF

SEQ ID NO: 9571 - protein, 19 aa, Artificial
  helical interface sequence
VNQHLCGSHLVEALYLVCG

SEQ ID NO: 9572 - protein, 19 aa, Artificial
  helical interface sequence
VNQHLCGSHLVEALYLVCG

SEQ ID NO: 9573 - protein, 6 aa, Artificial
  helical interface sequence
KDCLIG

SEQ ID NO: 9574 - protein, 13 aa, Artificial
  helical interface sequence
VKELIQQAIAKIG

SEQ ID NO: 9575 - protein, 29 aa, Artificial
  helical interface sequence
SKAMSIMNSFVNDVFERIAGEASRLAHYN

SEQ ID NO: 9576 - protein, 11 aa, Artificial
  helical interface sequence
VYFLSKLFSTD

SEQ ID NO: 9577 - protein, 23 aa, Artificial
  helical interface sequence
TEELFDFLHARDHCVAHKLFNSL

SEQ ID NO: 9578 - protein, 31 aa, Artificial; identical to SEQ ID NO: 1463
  helical interface sequence

SEQ ID NO: 9579 - protein, 14 aa, Artificial
  helical interface sequence
DEQITKQLEYCLNQ

SEQ ID NO: 9580 - protein, 12 aa, Artificial
  helical interface sequence
DEEVDEMIREAD

SEQ ID NO: 9581 - protein, 7 aa, Artificial
  helical interface sequence
SEQLTSG

SEQ ID NO: 9582 - protein, 19 aa, Artificial
  helical interface sequence
LECLRLLNEIIADFDDLLS

SEQ ID NO: 9583 - protein, 12 aa, Artificial
  helical interface sequence
AWPTKLEWERHK

SEQ ID NO: 9584 - protein, 6 aa, Artificial
  helical interface sequence
DEQLKS

SEQ ID NO: 9585 - protein, 9 aa, Artificial
  helical interface sequence
WWKLYSKVK

SEQ ID NO: 9586 - protein, 19 aa, Artificial
  helical interface sequence
KMLQGRLFAYPDTHRHRLG

SEQ ID NO: 9587 - protein, 8 aa, Artificial
  helical interface sequence
GEEVEELL

SEQ ID NO: 9588 - protein, 8 aa, Artificial
  helical interface sequence
RQVSDLTF

SEQ ID NO: 9589 - protein, 15 aa, Artificial
  helical interface sequence
IREMLPVLEAVAKAG

SEQ ID NO: 9590 - protein, 7 aa, Artificial
  helical interface sequence
LKELQEM

SEQ ID NO: 9591 - protein, 15 aa, Artificial
  helical interface sequence
MFERHQLLGLAYQGL

SEQ ID NO: 9592 - protein, 9 aa, Artificial
  helical interface sequence
QEICEYFAG

SEQ ID NO: 9593 - protein, 6 aa, Artificial
  helical interface sequence
SEQLTS

SEQ ID NO: 9594 - protein, 11 aa, Artificial
  helical interface sequence
TVALREIRRYQ

SEQ ID NO: 9595 - protein, 9 aa, Artificial
  helical interface sequence
KYLSQQWAK

SEQ ID NO: 9596 - protein, 9 aa, Artificial
  helical interface sequence
KYLSQQWAK

SEQ ID NO: 9597 - protein, 12 aa, Artificial
  helical interface sequence
PKDIQLARRIRG

SEQ ID NO: 9598 - protein, 15 aa, Artificial
  helical interface sequence
INSAARNIQHLLYGK

SEQ ID NO: 9599 - protein, 22 aa, Artificial
  helical interface sequence
IPDGRHLVNRGREEAASFKKLY

SEQ ID NO: 9600 - protein, 22 aa, Artificial
  helical interface sequence
IPDGRHLVNRGREEAASFKKLY

SEQ ID NO: 9601 - protein, 14 aa, Artificial
  helical interface sequence
YQVWHHRRVLVEWL

SEQ ID NO: 9602 - protein, 8 aa, Artificial
  helical interface sequence
PEEIRKTF

SEQ ID NO: 9603 - protein, 8 aa, Artificial
  helical interface sequence
PEEIRKTF

SEQ ID NO: 9604 - protein, 19 aa, Artificial
  helical interface sequence
PVNFKLLSHSLLVTLASHL

SEQ ID NO: 9605 - protein, 15 aa, Artificial
  helical interface sequence
INSAARNIQHLLYGK

SEQ ID NO: 9606 - protein, 13 aa, Artificial
  helical interface sequence
VGELFWKVKEEEG

SEQ ID NO: 9607 - protein, 13 aa, Artificial
  helical interface sequence
IQMLLEAADYLER

SEQ ID NO: 9608 - protein, 11 aa, Artificial
  helical interface sequence
KEEKQKVIQEF

SEQ ID NO: 9609 - protein, 6 aa, Artificial
  helical interface sequence
DAWSSR

SEQ ID NO: 9610 - protein, 12 aa, Artificial
  helical interface sequence
IMNLYRGVKRAS

SEQ ID NO: 9611 - protein, 5 aa, Artificial
  helical interface sequence
RTSTK

SEQ ID NO: 9612 - protein, 12 aa, Artificial
  helical interface sequence
SYELEAFVKALK

SEQ ID NO: 9613 - protein, 12 aa, Artificial
  helical interface sequence
LWHFRSLMFTRQ

SEQ ID NO: 9614 - protein, 12 aa, Artificial
  helical interface sequence
KVEGTAVGFSFF

SEQ ID NO: 9615 - protein, 20 aa, Artificial
  helical interface sequence
VEAVEIMQRIHVLRSQGGFN

SEQ ID NO: 9616 - protein, 19 aa, Artificial
  helical interface sequence
PVNFKFLGHCFLVVVAIHH

SEQ ID NO: 9617 - protein, 5 aa, Artificial
  helical interface sequence
QEKFG

SEQ ID NO: 9618 - protein, 5 aa, Artificial
  helical interface sequence
DEQLK

SEQ ID NO: 9619 - protein, 18 aa, Artificial
  helical interface sequence
RLELEAAQKFLERAAVEN

SEQ ID NO: 9620 - protein, 11 aa, Artificial
  helical interface sequence
ERVKKEIKDLE

SEQ ID NO: 9621 - protein, 14 aa, Artificial
  helical interface sequence
AKNYGRAVYECLRG

SEQ ID NO: 9622 - protein, 11 aa, Artificial
  helical interface sequence
YQVEYAMEAIG

SEQ ID NO: 9623 - protein, 22 aa, Artificial
  helical interface sequence
YADFQYLKQVLGQMVIDEELLG

SEQ ID NO: 9624 - protein, 22 aa, Artificial
  helical interface sequence
ATDVQTVAQRLKFRLNLYELKE

SEQ ID NO: 9625 - protein, 13 aa, Artificial
  helical interface sequence
IEGRNAAYEAIIK

SEQ ID NO: 9626 - protein, 13 aa, Artificial
  helical interface sequence
ESFRVLVKELQAL

SEQ ID NO: 9627 - protein, 5 aa, Artificial
  helical interface sequence
AELEK

SEQ ID NO: 9628 - protein, 11 aa, Artificial
  helical interface sequence
DDIEELMKDGD

SEQ ID NO: 9629 - protein, 46 aa, Artificial; identical to SEQ ID NO: 137
  helical interface sequence

SEQ ID NO: 9630 - protein, 11 aa, Artificial
  helical interface sequence
SLAAMAVLESH

SEQ ID NO: 9631 - protein, 19 aa, Artificial
  helical interface sequence
VEDALYLGKRSILAAAHRD

SEQ ID NO: 9632 - protein, 13 aa, Artificial
  helical interface sequence
GQIDYALTAVKQG

SEQ ID NO: 9633 - protein, 19 aa, Artificial
  helical interface sequence
PVNFKLLSHCLLVTLAARF

SEQ ID NO: 9634 - protein, 19 aa, Artificial
  helical interface sequence
AEAHAAWDKFLSVVSSVLT

SEQ ID NO: 9635 - protein, 9 aa, Artificial
  helical interface sequence
HRAARIAAR

SEQ ID NO: 9636 - protein, 10 aa, Artificial
  helical interface sequence
THFIESLEAI

SEQ ID NO: 9637 - protein, 17 aa, Artificial
  helical interface sequence
RIEYNVEHAVDYVERAV

SEQ ID NO: 9638 - protein, 17 aa, Artificial
  helical interface sequence
RIEYNVEHAVDYVERAV

SEQ ID NO: 9639 - protein, 8 aa, Artificial
  helical interface sequence
TSVSLWKG

SEQ ID NO: 9640 - protein, 29 aa, Artificial
  helical interface sequence
SSAVMALQEASEAYLVALFEDTNLCAIHA

SEQ ID NO: 9641 - protein, 7 aa, Artificial
  helical interface sequence
PYQVRDC

SEQ ID NO: 9642 - protein, 22 aa, Artificial
  helical interface sequence
NMGSLLGLCLVIQIVTGIFMAM

SEQ ID NO: 9643 - protein, 10 aa, Artificial
  helical interface sequence
WVDWWQWWVK

SEQ ID NO: 9644 - protein, 10 aa, Artificial
  helical interface sequence
EKGIYKAMSE

SEQ ID NO: 9645 - protein, 10 aa, Artificial
  helical interface sequence
ASEEEFLRTY

SEQ ID NO: 9646 - protein, 23 aa, Artificial
  helical interface sequence
SVLEHLRAKMQRMEEAIKTQKEL

SEQ ID NO: 9647 - protein, 6 aa, Artificial
  helical interface sequence
RLWKDY

SEQ ID NO: 9648 - protein, 28 aa, Artificial
  helical interface sequence
DLAIFAVHLSGASSILGAINMITTFLNM

SEQ ID NO: 9649 - protein, 7 aa, Artificial
  helical interface sequence
FFTRWFM

SEQ ID NO: 9650 - protein, 6 aa, Artificial
  helical interface sequence
IGCSFY

SEQ ID NO: 9651 - protein, 9 aa, Artificial
  helical interface sequence
AVPKAEWTN

SEQ ID NO: 9652 - protein, 13 aa, Artificial
  helical interface sequence
PLNAFDGALLNAG

SEQ ID NO: 9653 - protein, 18 aa, Artificial
  helical interface sequence
DDHLEFALHLHRRLAEAV

SEQ ID NO: 9654 - protein, 20 aa, Artificial
  helical interface sequence
EILERTRAELDTVCRHNYEG

SEQ ID NO: 9655 - protein, 7 aa, Artificial
  helical interface sequence
KAEIANK

SEQ ID NO: 9656 - protein, 11 aa, Artificial
  helical interface sequence
FSHSFSALAKF

SEQ ID NO: 9657 - protein, 19 aa, Artificial
  helical interface sequence
EDDSKLASRKYARIIQKIG

SEQ ID NO: 9658 - protein, 13 aa, Artificial
  helical interface sequence
SEEEIREAFRVFD

SEQ ID NO: 9659 - protein, 13 aa, Artificial
  helical interface sequence
YAMKRHKWSVLKS

SEQ ID NO: 9660 - protein, 10 aa, Artificial
  helical interface sequence
LRGIKQAATK

SEQ ID NO: 9661 - protein, 14 aa, Artificial
  helical interface sequence
LGDLPPILNRKRAQ

SEQ ID NO: 9662 - protein, 25 aa, Artificial
  helical interface sequence
PAMMWALGFIFLFTVGGLTGIVLAN

SEQ ID NO: 9663 - protein, 10 aa, Artificial
  helical interface sequence
VAEKQKLFQE

SEQ ID NO: 9664 - protein, 13 aa, Artificial
  helical interface sequence
EHQLRREVEIQSH

SEQ ID NO: 9665 - protein, 7 aa, Artificial
  helical interface sequence
AAITLKA

SEQ ID NO: 9666 - protein, 35 aa, Artificial
  helical interface sequence
QQEYKKQMLTAAHALAVDAKNLLDVIDQARLKMLG

SEQ ID NO: 9667 - protein, 14 aa, Artificial
  helical interface sequence
HVNQEVIKRMLNLE

SEQ ID NO: 9668 - protein, 9 aa, Artificial
  helical interface sequence
KEWYRVTSD

SEQ ID NO: 9669 - protein, 12 aa, Artificial
  helical interface sequence
PKVLVRQFVERF

SEQ ID NO: 9670 - protein, 5 aa, Artificial
  helical interface sequence
YANAN

SEQ ID NO: 9671 - protein, 22 aa, Artificial
  helical interface sequence
VGDAQVLVRYMKAELELYRLQR

SEQ ID NO: 9672 - protein, 21 aa, Artificial
  helical interface sequence
WGRIVAFFSFGGALCVESVDK

SEQ ID NO: 9673 - protein, 8 aa, Artificial
  helical interface sequence
WYLWCVKH

SEQ ID NO: 9674 - protein, 18 aa, Artificial
  helical interface sequence
WSMYSRLRKMLYLIYVAG

SEQ ID NO: 9675 - protein, 15 aa, Artificial
  helical interface sequence
VQSLLDEEQEQMFAS

SEQ ID NO: 9676 - protein, 7 aa, Artificial
  helical interface sequence
EADAKDL

SEQ ID NO: 9677 - protein, 35 aa, Artificial; identical to SEQ ID NO: 2532
  helical interface sequence

SEQ ID NO: 9678 - protein, 16 aa, Artificial
  helical interface sequence
DTDSEEELKEAFRVFD

SEQ ID NO: 9679 - protein, 15 aa, Artificial
  helical interface sequence
TEFEYLRKVLFEYMM

SEQ ID NO: 9680 - protein, 15 aa, Artificial
  helical interface sequence
IIARRWINGMLISLL

SEQ ID NO: 9681 - protein, 5 aa, Artificial
  helical interface sequence
EEFAK

SEQ ID NO: 9682 - protein, 9 aa, Artificial
  helical interface sequence
RPDAENWNS

SEQ ID NO: 9683 - protein, 6 aa, Artificial
  helical interface sequence
WTDGLT

SEQ ID NO: 9684 - protein, 23 aa, Artificial
  helical interface sequence
QKSTQNAIDGITNKVNSVIEKMN

SEQ ID NO: 9685 - protein, 28 aa, Artificial
  helical interface sequence
KRALIQCAKDIAKASDEVTRLAKEVAKQ

SEQ ID NO: 9686 - protein, 15 aa, Artificial
  helical interface sequence
PYSNQIEREELILKY

SEQ ID NO: 9687 - protein, 13 aa, Artificial
  helical interface sequence
VGELFWKVKEEEG

SEQ ID NO: 9688 - protein, 18 aa, Artificial
  helical interface sequence
CDVLAKRMANLSQIYTQR

SEQ ID NO: 9689 - protein, 15 aa, Artificial
  helical interface sequence
VAAASKILSNLVYQY

SEQ ID NO: 9690 - protein, 11 aa, Artificial
  helical interface sequence
PQVVISFYEER

SEQ ID NO: 9691 - protein, 15 aa, Artificial
  helical interface sequence
ADQKDLLRMSWGVLS

SEQ ID NO: 9692 - protein, 14 aa, Artificial
  helical interface sequence
NESKWNINVRQLLS

SEQ ID NO: 9693 - protein, 16 aa, Artificial
  helical interface sequence
ADEIKRLGKRFKKLDL

SEQ ID NO: 9694 - protein, 9 aa, Artificial
  helical interface sequence
KLFLEMLEA

SEQ ID NO: 9695 - protein, 15 aa, Artificial
  helical interface sequence
RPWLCYWILHSLELL

SEQ ID NO: 9696 - protein, 33 aa, Artificial; identical to SEQ ID NO: 7149
  helical interface sequence

SEQ ID NO: 9697 - protein, 13 aa, Artificial
  helical interface sequence
FITFLGALKSFLK

SEQ ID NO: 9698 - protein, 14 aa, Artificial
  helical interface sequence
LVPSYAEKEAKISR

SEQ ID NO: 9699 - protein, 12 aa, Artificial
  helical interface sequence
PKDIQLARRIRG

SEQ ID NO: 9700 - protein, 6 aa, Artificial
  helical interface sequence
PESLKT

SEQ ID NO: 9701 - protein, 19 aa, Artificial
  helical interface sequence
DGLDIRKAAFECMYTLLDS

SEQ ID NO: 9702 - protein, 12 aa, Artificial
  helical interface sequence
WHLLRQEALLKE

SEQ ID NO: 9703 - protein, 21 aa, Artificial
  helical interface sequence
NAPGAAANRVALEACTQARNE

SEQ ID NO: 9704 - protein, 14 aa, Artificial
  helical interface sequence
AKNYGRAVYECLRG

SEQ ID NO: 9705 - protein, 14 aa, Artificial
  helical interface sequence
AKNYGRAVYECLRG

SEQ ID NO: 9706 - protein, 24 aa, Artificial
  helical interface sequence
ARTWRFLTFGLALPSVALCTLNSW

SEQ ID NO: 9707 - protein, 17 aa, Artificial
  helical interface sequence
FAVAEKRKKAYADFYRN

SEQ ID NO: 9708 - protein, 24 aa, Artificial
  helical interface sequence
ARTWRFLTFGLALPSVALCTLNSW

SEQ ID NO: 9709 - protein, 33 aa, Artificial; identical to SEQ ID NO: 7876
  helical interface sequence

SEQ ID NO: 9710 - protein, 5 aa, Artificial
  helical interface sequence
ITDYF

SEQ ID NO: 9711 - protein, 13 aa, Artificial
  helical interface sequence
STAIREISLLKEL

SEQ ID NO: 9712 - protein, 10 aa, Artificial
  helical interface sequence
HWKNQFDHYS

SEQ ID NO: 9713 - protein, 18 aa, Artificial
  helical interface sequence
RDAIKRIAYEFVEMKAKD

SEQ ID NO: 9714 - protein, 10 aa, Artificial
  helical interface sequence
FAHAVFALLF

SEQ ID NO: 9715 - protein, 12 aa, Artificial
  helical interface sequence
LKKLVYLYLMNY

SEQ ID NO: 9716 - protein, 5 aa, Artificial
  helical interface sequence
LQEFI

SEQ ID NO: 9717 - protein, 11 aa, Artificial
  helical interface sequence
EETIRNAFAMF

SEQ ID NO: 9718 - protein, 10 aa, Artificial
  helical interface sequence
EETLMEYLEN

SEQ ID NO: 9719 - protein, 14 aa, Artificial
  helical interface sequence
LASTLMEQYMKATA

SEQ ID NO: 9720 - protein, 16 aa, Artificial
  helical interface sequence
KETLEAFAEAMGALLK

SEQ ID NO: 9721 - protein, 15 aa, Artificial
  helical interface sequence
QLTALMGAMYLAALG

SEQ ID NO: 9722 - protein, 16 aa, Artificial
  helical interface sequence
KETLEAFAEAMGALLK

SEQ ID NO: 9723 - protein, 5 aa, Artificial
  helical interface sequence
AFSLF

SEQ ID NO: 9724 - protein, 15 aa, Artificial
  helical interface sequence
SLEKQKGVTNLLIKY

SEQ ID NO: 9725 - protein, 5 aa, Artificial
  helical interface sequence
AFSLF

SEQ ID NO: 9726 - protein, 13 aa, Artificial
  helical interface sequence
SAEFIKNLSSIRR

SEQ ID NO: 9727 - protein, 7 aa, Artificial
  helical interface sequence
KEAFSLF

SEQ ID NO: 9728 - protein, 11 aa, Artificial
  helical interface sequence
IAEFKEAFSLF

SEQ ID NO: 9729 - protein, 7 aa, Artificial
  helical interface sequence
KEAFSLF

SEQ ID NO: 9730 - protein, 9 aa, Artificial
  helical interface sequence
VDQMIREAD

SEQ ID NO: 9731 - protein, 7 aa, Artificial
  helical interface sequence
KEAFSLF

SEQ ID NO: 9732 - protein, 6 aa, Artificial
  helical interface sequence
RFYQDL

SEQ ID NO: 9733 - protein, 16 aa, Artificial
  helical interface sequence
AEEIGSDALSRMLAVY

SEQ ID NO: 9734 - protein, 13 aa, Artificial
  helical interface sequence
QEELEFCEKLLQT

SEQ ID NO: 9735 - protein, 14 aa, Artificial
  helical interface sequence
GLGAEIAKNLILAG

SEQ ID NO: 9736 - protein, 13 aa, Artificial
  helical interface sequence
FQVEYAREAVKKG

SEQ ID NO: 9737 - protein, 13 aa, Artificial
  helical interface sequence
FQVEYAREAVKKG

SEQ ID NO: 9738 - protein, 13 aa, Artificial
  helical interface sequence
PYIRERVVDQLAH

SEQ ID NO: 9739 - protein, 18 aa, Artificial
  helical interface sequence
PLLQGRLFSYTDTQISRL

SEQ ID NO: 9740 - protein, 13 aa, Artificial
  helical interface sequence
PYIRERVVDQLAH

SEQ ID NO: 9741 - protein, 9 aa, Artificial
  helical interface sequence
DTFWDYVSL

SEQ ID NO: 9742 - protein, 10 aa, Artificial
  helical interface sequence
VVEIILNLKE

SEQ ID NO: 9743 - protein, 7 aa, Artificial
  helical interface sequence
LLIEMLH

SEQ ID NO: 9744 - protein, 5 aa, Artificial
  helical interface sequence
LVLPG

SEQ ID NO: 9745 - protein, 26 aa, Artificial
  helical interface sequence
TDLVETLELQNLMLCALQTIYGAEAR

SEQ ID NO: 9746 - protein, 23 aa, Artificial
  helical interface sequence
MDEVRTLQENLRQLQDEYDQQQT

SEQ ID NO: 9747 - protein, 15 aa, Artificial
  helical interface sequence
ALSRLAQERKAWRKD

SEQ ID NO: 9748 - protein, 16 aa, Artificial
  helical interface sequence
LSLALYVFDEYLQKTV

SEQ ID NO: 9749 - protein, 22 aa, Artificial
  helical interface sequence
AADTEAVTQLIGSNIELHSLYT

SEQ ID NO: 9750 - protein, 22 aa, Artificial
  helical interface sequence
AADGDALVKRFKNSVKWYHFDH

SEQ ID NO: 9751 - protein, 20 aa, Artificial
  helical interface sequence
ISDMQHIERLLKDLVTENAY

SEQ ID NO: 9752 - protein, 41 aa, Artificial; identical to SEQ ID NO: 2156
  helical interface sequence

SEQ ID NO: 9753 - protein, 10 aa, Artificial
  helical interface sequence
PRHLQLAVRN

SEQ ID NO: 9754 - protein, 8 aa, Artificial
  helical interface sequence
RPDAEYWN

SEQ ID NO: 9755 - protein, 20 aa, Artificial
  helical interface sequence
DLLMEKLEQDFVSRVTECLT

SEQ ID NO: 9756 - protein, 10 aa, Artificial
  helical interface sequence
EQEFLRIMKK

SEQ ID NO: 9757 - protein, 19 aa, Artificial
  helical interface sequence
PSNFKILNHCILVVISTMF

SEQ ID NO: 9758 - protein, 20 aa, Artificial
  helical interface sequence
RRMENLVAYAKKVEGDMYES

SEQ ID NO: 9759 - protein, 9 aa, Artificial
  helical interface sequence
KASAMFRLG

SEQ ID NO: 9760 - protein, 26 aa, Artificial
  helical interface sequence
GEAYLSYSLGALSMMGFIATCFVWFN

SEQ ID NO: 9761 - protein, 6 aa, Artificial
  helical interface sequence
VVDEKL

SEQ ID NO: 9762 - protein, 21 aa, Artificial
  helical interface sequence
RTSLYLGLLLILVLALLFSSY

SEQ ID NO: 9763 - protein, 14 aa, Artificial
  helical interface sequence
NKERVIAIGEIMRL

SEQ ID NO: 9764 - protein, 19 aa, Artificial
  helical interface sequence
PEDILVDIKRDYVLSKLRD

SEQ ID NO: 9765 - protein, 12 aa, Artificial
  helical interface sequence
EEEIREAFRVFD

SEQ ID NO: 9766 - protein, 9 aa, Artificial
  helical interface sequence
PEVTQFIKC

SEQ ID NO: 9767 - protein, 18 aa, Artificial
  helical interface sequence
RAISKAVDTVEIVRNRFL

SEQ ID NO: 9768 - protein, 11 aa, Artificial
  helical interface sequence
VEEAKNRAEQW

SEQ ID NO: 9769 - protein, 27 aa, Artificial
  helical interface sequence
PEETTCSEHCLQKYLKMTQRISMRFQE

SEQ ID NO: 9770 - protein, 8 aa, Artificial
  helical interface sequence
LSEINRSF

SEQ ID NO: 9771 - protein, 12 aa, Artificial
  helical interface sequence
PLTEAIAAADLR

SEQ ID NO: 9772 - protein, 21 aa, Artificial
  helical interface sequence
KAVANSLKSWNETLTSRLATL

SEQ ID NO: 9773 - protein, 5 aa, Artificial
  helical interface sequence
PKELN

SEQ ID NO: 9774 - protein, 14 aa, Artificial
  helical interface sequence
VPVLNALLARLNSQ

SEQ ID NO: 9775 - protein, 13 aa, Artificial
  helical interface sequence
EAEKYAYADRSEY

SEQ ID NO: 9776 - protein, 9 aa, Artificial
  helical interface sequence
AEERRRKQN

SEQ ID NO: 9777 - protein, 6 aa, Artificial
  helical interface sequence
RDCLIG

SEQ ID NO: 9778 - protein, 11 aa, Artificial
  helical interface sequence
HMNDIKQLLWN

SEQ ID NO: 9779 - protein, 13 aa, Artificial
  helical interface sequence
IAGLVAGDLLTRA

SEQ ID NO: 9780 - protein, 18 aa, Artificial
  helical interface sequence
PYAAQLAALDAAKKAMAY

SEQ ID NO: 9781 - protein, 18 aa, Artificial
  helical interface sequence
GDEQRRQRHDLERIRIAN

SEQ ID NO: 9782 - protein, 11 aa, Artificial
  helical interface sequence
AMDVVYALKRQ

SEQ ID NO: 9783 - protein, 23 aa, Artificial
  helical interface sequence
KESTQKAIDGVTNKVNSIIDKMN

SEQ ID NO: 9784 - protein, 22 aa, Artificial
  helical interface sequence
GEKFSTALNGFYNYLEVFSRSL

SEQ ID NO: 9785 - protein, 11 aa, Artificial
  helical interface sequence
PTEVMGVASFY

SEQ ID NO: 9786 - protein, 11 aa, Artificial
  helical interface sequence
PTEVMGVASFY

SEQ ID NO: 9787 - protein, 53 aa, Artificial; identical to SEQ ID NO: 3114
  helical interface sequence

SEQ ID NO: 9788 - protein, 13 aa, Artificial
  helical interface sequence
NHAIVQTLVNSVN

SEQ ID NO: 9789 - protein, 8 aa, Artificial
  helical interface sequence
ENEFIAIC

SEQ ID NO: 9790 - protein, 9 aa, Artificial
  helical interface sequence
DDSKDTWKK

SEQ ID NO: 9791 - protein, 13 aa, Artificial
  helical interface sequence
EATHNAIKFRARA

SEQ ID NO: 9792 - protein, 7 aa, Artificial
  helical interface sequence
SDFQCKD

SEQ ID NO: 9793 - protein, 53 aa, Artificial
  helical interface sequence
LKEVEMRLKSIKNIEKITKTMKIVASTRLSKAEKAKISAKKMDEAEQLFYKNA

SEQ ID NO: 9794 - protein, 14 aa, Artificial
  helical interface sequence
HSVQVALKYVAATG

SEQ ID NO: 9795 - protein, 9 aa, Artificial
  helical interface sequence
SLESCLKFA

SEQ ID NO: 9796 - protein, 12 aa, Artificial
  helical interface sequence
EDTFKQIYAQFF

SEQ ID NO: 9797 - protein, 12 aa, Artificial
  helical interface sequence
DKVLRDLMMLSD

SEQ ID NO: 9798 - protein, 6 aa, Artificial
  helical interface sequence
EEFGRF

SEQ ID NO: 9799 - protein, 5 aa, Artificial
  helical interface sequence
WSDRF

SEQ ID NO: 9800 - protein, 24 aa, Artificial
  helical interface sequence
FRKARETLFAAGNYAYAHRKRRKR

SEQ ID NO: 9801 - protein, 7 aa, Artificial
  helical interface sequence
KGDLGLV

SEQ ID NO: 9802 - protein, 14 aa, Artificial
  helical interface sequence
APIREMVCFVLEQN

SEQ ID NO: 9803 - protein, 8 aa, Artificial
  helical interface sequence
REWFKDML

SEQ ID NO: 9804 - protein, 9 aa, Artificial
  helical interface sequence
PAPATTFAH

SEQ ID NO: 9805 - protein, 12 aa, Artificial
  helical interface sequence
ERRIKDLVKRHS

SEQ ID NO: 9806 - protein, 18 aa, Artificial
  helical interface sequence
DSVKQSAALCLLRLYRTS

SEQ ID NO: 9807 - protein, 10 aa, Artificial
  helical interface sequence
ERVKRGMAEM

SEQ ID NO: 9808 - protein, 11 aa, Artificial
  helical interface sequence
RLPALRSIGLK

SEQ ID NO: 9809 - protein, 11 aa, Artificial
  helical interface sequence
RLPALRSIGLK

SEQ ID NO: 9810 - protein, 12 aa, Artificial
  helical interface sequence
TDAGCFLLAEQF

SEQ ID NO: 9811 - protein, 12 aa, Artificial
  helical interface sequence
PLLLKRRKKARA

SEQ ID NO: 9812 - protein, 11 aa, Artificial
  helical interface sequence
DEEVDEIINLT

SEQ ID NO: 9813 - protein, 14 aa, Artificial
  helical interface sequence
LKTVFDEAIRAVLG

SEQ ID NO: 9814 - protein, 5 aa, Artificial
  helical interface sequence
DRLRP

SEQ ID NO: 9815 - protein, 8 aa, Artificial
  helical interface sequence
PLHLAADN

SEQ ID NO: 9816 - protein, 15 aa, Artificial
  helical interface sequence
GDVDHSTLVTLFKLL

SEQ ID NO: 9817 - protein, 22 aa, Artificial
  helical interface sequence
PKDALLKAIENIRGMTSHYIDE

SEQ ID NO: 9818 - protein, 17 aa, Artificial
  helical interface sequence
GPSKLIAPVIDELAKEY

SEQ ID NO: 9819 - protein, 9 aa, Artificial
  helical interface sequence
RTFSERTLA

SEQ ID NO: 9820 - protein, 29 aa, Artificial
  helical interface sequence
ADEIRTLVKDMWDTRIAKLRVSADSFVRQ

SEQ ID NO: 9821 - protein, 29 aa, Artificial
  helical interface sequence
GFMLRYLHANGASLFFIAVYLHIFRGLYY

SEQ ID NO: 9822 - protein, 15 aa, Artificial
  helical interface sequence
QMSFWGATVITGLFG

SEQ ID NO: 9823 - protein, 15 aa, Artificial
  helical interface sequence
VDLAFASVEHIMRNV

SEQ ID NO: 9824 - protein, 7 aa, Artificial
  helical interface sequence
PLLWKWS

SEQ ID NO: 9825 - protein, 13 aa, Artificial
  helical interface sequence
PLNAFDGALLNAG

SEQ ID NO: 9826 - protein, 11 aa, Artificial
  helical interface sequence
VSDKRDISRFL

SEQ ID NO: 9827 - protein, 20 aa, Artificial
  helical interface sequence
PENFRLLGNVLVIVLSHHFG

SEQ ID NO: 9828 - protein, 13 aa, Artificial
  helical interface sequence
VAQIDALSQMVAE

SEQ ID NO: 9829 - protein, 7 aa, Artificial
  helical interface sequence
DGSVGYS

SEQ ID NO: 9830 - protein, 7 aa, Artificial
  helical interface sequence
QEKLSRT

SEQ ID NO: 9831 - protein, 22 aa, Artificial
  helical interface sequence
AGEFEEALHTAALALVKDIASD

SEQ ID NO: 9832 - protein, 14 aa, Artificial
  helical interface sequence
PAEQDRLFRRVMDR

SEQ ID NO: 9833 - protein, 12 aa, Artificial
  helical interface sequence
SQAACYELTMEY

SEQ ID NO: 9834 - protein, 14 aa, Artificial
  helical interface sequence
RSTVAQLVKRLTDA

SEQ ID NO: 9835 - protein, 14 aa, Artificial
  helical interface sequence
FATIIERSKKFING

SEQ ID NO: 9836 - protein, 9 aa, Artificial
  helical interface sequence
DKQWAGMMM

SEQ ID NO: 9837 - protein, 16 aa, Artificial
  helical interface sequence
IDTARIIFNQVMEKEF

SEQ ID NO: 9838 - protein, 6 aa, Artificial
  helical interface sequence
HQDWLN

SEQ ID NO: 9839 - protein, 10 aa, Artificial
  helical interface sequence
ETAYGLLTAE

SEQ ID NO: 9840 - protein, 6 aa, Artificial
  helical interface sequence
SEELQA

SEQ ID NO: 9841 - protein, 18 aa, Artificial
  helical interface sequence
VSGTLIGLEFIRKSQLVQ

SEQ ID NO: 9842 - protein, 5 aa, Artificial
  helical interface sequence
TVWQK

SEQ ID NO: 9843 - protein, 17 aa, Artificial
  helical interface sequence
DECRARAGALDAVGGSL

SEQ ID NO: 9844 - protein, 5 aa, Artificial
  helical interface sequence
TVWQK

SEQ ID NO: 9845 - protein, 7 aa, Artificial
  helical interface sequence
SEQLTSG

SEQ ID NO: 9846 - protein, 6 aa, Artificial
  helical interface sequence
TWIFRG

SEQ ID NO: 9847 - protein, 28 aa, Artificial
  helical interface sequence
SGELLNAALLSFGLIFVGWALGALLLKI

SEQ ID NO: 9848 - protein, 5 aa, Artificial
  helical interface sequence
AYQRF

SEQ ID NO: 9849 - protein, 5 aa, Artificial
  helical interface sequence
PLNSE

SEQ ID NO: 9850 - protein, 7 aa, Artificial
  helical interface sequence
LNKIKND

SEQ ID NO: 9851 - protein, 9 aa, Artificial
  helical interface sequence
LLAYLRRKL

SEQ ID NO: 9852 - protein, 29 aa, Artificial
  helical interface sequence
PEFEEQEAIMKVLQRDAALKRAEEERVRH

SEQ ID NO: 9853 - protein, 13 aa, Artificial
  helical interface sequence
RVLNAACQRLARA

SEQ ID NO: 9854 - protein, 17 aa, Artificial
  helical interface sequence
SEDFRRTRNSAEAIIHG

SEQ ID NO: 9855 - protein, 6 aa, Artificial
  helical interface sequence
SEQLTS

SEQ ID NO: 9856 - protein, 8 aa, Artificial
  helical interface sequence
SKYLESWE

SEQ ID NO: 9857 - protein, 26 aa, Artificial
  helical interface sequence
YLQEIYNSNNQKIVNLKEKVAQLEAQ

SEQ ID NO: 9858 - protein, 9 aa, Artificial
  helical interface sequence
RPVAESWNS

SEQ ID NO: 9859 - protein, 7 aa, Artificial
  helical interface sequence
PEFGQLA

SEQ ID NO: 9860 - protein, 5 aa, Artificial
  helical interface sequence
YFYSE

SEQ ID NO: 9861 - protein, 5 aa, Artificial
  helical interface sequence
YEYFT

SEQ ID NO: 9862 - protein, 13 aa, Artificial
  helical interface sequence
ALSQYRQIKQFTK

SEQ ID NO: 9863 - protein, 18 aa, Artificial
  helical interface sequence
IDDLIHFTLKQWNRLTIS

SEQ ID NO: 9864 - protein, 12 aa, Artificial
  helical interface sequence
ALKLVRESELLG

SEQ ID NO: 9865 - protein, 36 aa, Artificial; identical to SEQ ID NO: 737
  helical interface sequence

SEQ ID NO: 9866 - protein, 29 aa, Artificial
  helical interface sequence
AQDKLVAETEDRKNTLEEYIYTLRGKLEE

SEQ ID NO: 9867 - protein, 12 aa, Artificial
  helical interface sequence
PHLLWEVVRWQL

SEQ ID NO: 9868 - protein, 13 aa, Artificial
  helical interface sequence
IPKVYELVERAKG

SEQ ID NO: 9869 - protein, 13 aa, Artificial
  helical interface sequence
KAEVAAEFLNDRV

SEQ ID NO: 9870 - protein, 12 aa, Artificial
  helical interface sequence
VVTKSIVNADAE

SEQ ID NO: 9871 - protein, 13 aa, Artificial
  helical interface sequence
TAAMEKLKAYFAT

SEQ ID NO: 9872 - protein, 7 aa, Artificial
  helical interface sequence
VTDLISI

SEQ ID NO: 9873 - protein, 12 aa, Artificial
  helical interface sequence
LYPIAVLIDELR

SEQ ID NO: 9874 - protein, 9 aa, Artificial
  helical interface sequence
VLLNWHEKV

SEQ ID NO: 9875 - protein, 28 aa, Artificial
  helical interface sequence
DKVASMTVEFWSTICEEEIDIAYELAQF

SEQ ID NO: 9876 - protein, 24 aa, Artificial
  helical interface sequence
IEFRRTLTLSFFFKFYLTVLKKLG

SEQ ID NO: 9877 - protein, 5 aa, Artificial
  helical interface sequence
SDFQC

SEQ ID NO: 9878 - protein, 27 aa, Artificial
  helical interface sequence
PEGLRVFYYLVQDLKCLVFSLIGLHFK

SEQ ID NO: 9879 - protein, 16 aa, Artificial
  helical interface sequence
AQVPLGAGIALACKYN

SEQ ID NO: 9880 - protein, 6 aa, Artificial
  helical interface sequence
KILEDN

SEQ ID NO: 9881 - protein, 14 aa, Artificial
  helical interface sequence
EMGFAGIAVGAAMA

SEQ ID NO: 9882 - protein, 11 aa, Artificial
  helical interface sequence
RICLRELAHKG

SEQ ID NO: 9883 - protein, 10 aa, Artificial
  helical interface sequence
VEKLAEEAAA

SEQ ID NO: 9884 - protein, 5 aa, Artificial
  helical interface sequence
MPFQF

SEQ ID NO: 9885 - protein, 23 aa, Artificial
  helical interface sequence
EEEKQRRYAIFKNNLVYIHTHNQ

SEQ ID NO: 9886 - protein, 10 aa, Artificial
  helical interface sequence
TEMITTLKKI

SEQ ID NO: 9887 - protein, 11 aa, Artificial
  helical interface sequence
VNLYQNYSELI

SEQ ID NO: 9888 - protein, 17 aa, Artificial
  helical interface sequence
QTEVMKRLVNLGKASEG

SEQ ID NO: 9889 - protein, 21 aa, Artificial
  helical interface sequence
KAKISAKKMDEAEQLFYKNAE

SEQ ID NO: 9890 - protein, 16 aa, Artificial
  helical interface sequence
NYELISNELKARLLQE

SEQ ID NO: 9891 - protein, 13 aa, Artificial
  helical interface sequence
PLDEIKRAFQLFD

SEQ ID NO: 9892 - protein, 15 aa, Artificial
  helical interface sequence
DQRVLQSLLRLEERY

SEQ ID NO: 9893 - protein, 8 aa, Artificial
  helical interface sequence
VAWRNRCK

SEQ ID NO: 9894 - protein, 6 aa, Artificial
  helical interface sequence
SEELQA

SEQ ID NO: 9895 - protein, 8 aa, Artificial
  helical interface sequence
AQMEYCRT

SEQ ID NO: 9896 - protein, 16 aa, Artificial
  helical interface sequence
FEGKKDVAQIFNNILR

SEQ ID NO: 9897 - protein, 10 aa, Artificial
  helical interface sequence
AYKARYRIIY

SEQ ID NO: 9898 - protein, 6 aa, Artificial
  helical interface sequence
LYKMRT

SEQ ID NO: 9899 - protein, 13 aa, Artificial
  helical interface sequence
IPDLLIAATAELS

SEQ ID NO: 9900 - protein, 41 aa, Artificial; identical to SEQ ID NO: 1069
  helical interface sequence

SEQ ID NO: 9901 - protein, 12 aa, Artificial
  helical interface sequence
ACHLRKATCLLG

SEQ ID NO: 9902 - protein, 11 aa, Artificial
  helical interface sequence
EMERDCMIAHG

SEQ ID NO: 9903 - protein, 10 aa, Artificial
  helical interface sequence
PARLMETLRT

SEQ ID NO: 9904 - protein, 9 aa, Artificial
  helical interface sequence
PFEVAQLGS

SEQ ID NO: 9905 - protein, 15 aa, Artificial
  helical interface sequence
GTGALRIGAEFLARW

SEQ ID NO: 9906 - protein, 11 aa, Artificial
  helical interface sequence
LVFKLIADFRE

SEQ ID NO: 9907 - protein, 13 aa, Artificial
  helical interface sequence
ASAIQKLKAYFAT

SEQ ID NO: 9908 - protein, 13 aa, Artificial
  helical interface sequence
AITAVINSSDVQG

SEQ ID NO: 9909 - protein, 6 aa, Artificial
  helical interface sequence
YESIAY

SEQ ID NO: 9910 - protein, 13 aa, Artificial
  helical interface sequence
PMEVMLRAVFMQQ

SEQ ID NO: 9911 - protein, 6 aa, Artificial
  helical interface sequence
VESFFG

SEQ ID NO: 9912 - protein, 10 aa, Artificial
  helical interface sequence
ALEKEVESMG

SEQ ID NO: 9913 - protein, 11 aa, Artificial
  helical interface sequence
SFKITRGIEAV

SEQ ID NO: 9914 - protein, 35 aa, Artificial; identical to SEQ ID NO: 5344
  helical interface sequence

SEQ ID NO: 9915 - protein, 20 aa, Artificial
  helical interface sequence
FEGTYEEWREHMWSDVAAYF

SEQ ID NO: 9916 - protein, 22 aa, Artificial
  helical interface sequence
IQAGATANRVALEAMVLARNEG

SEQ ID NO: 9917 - protein, 21 aa, Artificial
  helical interface sequence
RWFLVQIEELVRLEEKVAEVG

SEQ ID NO: 9918 - protein, 13 aa, Artificial
  helical interface sequence
ASNEFLNIWGGQY

SEQ ID NO: 9919 - protein, 10 aa, Artificial
  helical interface sequence
RTFSERTLAF

SEQ ID NO: 9920 - protein, 14 aa, Artificial
  helical interface sequence
PFHTLFGIAGLSLL

SEQ ID NO: 9921 - protein, 19 aa, Artificial
  helical interface sequence
KMLQGRLFAYPDTHRHRLG

SEQ ID NO: 9922 - protein, 14 aa, Artificial
  helical interface sequence
PETLRLQASIAKDA

SEQ ID NO: 9923 - protein, 13 aa, Artificial
  helical interface sequence
DRLAMNFERAAEL

SEQ ID NO: 9924 - protein, 5 aa, Artificial
  helical interface sequence
MDMYR

SEQ ID NO: 9925 - protein, 15 aa, Artificial
  helical interface sequence
REDAVLEYLKIAQDL

SEQ ID NO: 9926 - protein, 10 aa, Artificial
  helical interface sequence
PRHLQLAIRN

SEQ ID NO: 9927 - protein, 11 aa, Artificial
  helical interface sequence
PKDIQLARRIR

SEQ ID NO: 9928 - protein, 36 aa, Artificial; identical to SEQ ID NO: 2251
  helical interface sequence

SEQ ID NO: 9929 - protein, 7 aa, Artificial
  helical interface sequence
KSEQKKN

SEQ ID NO: 9930 - protein, 12 aa, Artificial
  helical interface sequence
PLTEAIAAADSQ

SEQ ID NO: 9931 - protein, 16 aa, Artificial
  helical interface sequence
WYIQSLCQSLRERCPR

SEQ ID NO: 9932 - protein, 16 aa, Artificial
  helical interface sequence
WYIQSLCQSLRERCPR

SEQ ID NO: 9933 - protein, 6 aa, Artificial
  helical interface sequence
SEQLTS

SEQ ID NO: 9934 - protein, 8 aa, Artificial
  helical interface sequence
EAEIRMGM

SEQ ID NO: 9935 - protein, 16 aa, Artificial
  helical interface sequence
AGDYGGEALDRTFQSF

SEQ ID NO: 9936 - protein, 16 aa, Artificial
  helical interface sequence
AGDYGGEALDRTFQSF

SEQ ID NO: 9937 - protein, 11 aa, Artificial
  helical interface sequence
FVRYVQGLKKK

SEQ ID NO: 9938 - protein, 22 aa, Artificial
  helical interface sequence
ADCQFWETWLGSQCRLHELREK

SEQ ID NO: 9939 - protein, 12 aa, Artificial
  helical interface sequence
SDQLFGMCESLY

SEQ ID NO: 9940 - protein, 17 aa, Artificial
  helical interface sequence
PSYIFEYLATVMYQRRS

SEQ ID NO: 9941 - protein, 16 aa, Artificial
  helical interface sequence
AAEYGAEALERMFLSF

SEQ ID NO: 9942 - protein, 7 aa, Artificial
  helical interface sequence
PWTQRFF

SEQ ID NO: 9943 - protein, 7 aa, Artificial
  helical interface sequence
AQEVHRW

SEQ ID NO: 9944 - protein, 22 aa, Artificial
  helical interface sequence
IPDARNAALRAKAEAAEFRYKY

SEQ ID NO: 9945 - protein, 8 aa, Artificial
  helical interface sequence
KEYQELNF

SEQ ID NO: 9946 - protein, 5 aa, Artificial
  helical interface sequence
PVELN

SEQ ID NO: 9947 - protein, 5 aa, Artificial
  helical interface sequence
PVELN

SEQ ID NO: 9948 - protein, 9 aa, Artificial
  helical interface sequence
PWEQHAKWY

SEQ ID NO: 9949 - protein, 19 aa, Artificial
  helical interface sequence
PQNFPMLSECIIVTLATHL

SEQ ID NO: 9950 - protein, 13 aa, Artificial
  helical interface sequence
TAQIDALSQMVAE

SEQ ID NO: 9951 - protein, 13 aa, Artificial
  helical interface sequence
TAQIDALSQMVAE

SEQ ID NO: 9952 - protein, 5 aa, Artificial
  helical interface sequence
RTSTK

SEQ ID NO: 9953 - protein, 5 aa, Artificial
  helical interface sequence
IDRIT

SEQ ID NO: 9954 - protein, 27 aa, Artificial
  helical interface sequence
VFIFVGALTVLFGAIAYGEVTAAAATG

SEQ ID NO: 9955 - protein, 16 aa, Artificial
  helical interface sequence
ADAIGNDALSRMIVVY

SEQ ID NO: 9956 - protein, 12 aa, Artificial
  helical interface sequence
KVEGTAVGFSFF

SEQ ID NO: 9957 - protein, 26 aa, Artificial
  helical interface sequence
KLRRYTTFSKRKTGIMKKAYELSTLT

SEQ ID NO: 9958 - protein, 6 aa, Artificial
  helical interface sequence
PWTQRF

SEQ ID NO: 9959 - protein, 7 aa, Artificial
  helical interface sequence
ESDLYKL

SEQ ID NO: 9960 - protein, 23 aa, Artificial
  helical interface sequence
PEFLEQKRAEVDTVCRHNYEIFD

SEQ ID NO: 9961 - protein, 6 aa, Artificial
  helical interface sequence
EEFAKF

SEQ ID NO: 9962 - protein, 31 aa, Artificial
  helical interface sequence
NEERNLLSVAYKNVVGARRSSWRVVSSIEQK

SEQ ID NO: 9963 - protein, 6 aa, Artificial
  helical interface sequence
SEQLTS

SEQ ID NO: 9964 - protein, 5 aa, Artificial
  helical interface sequence
ESFLF

SEQ ID NO: 9965 - protein, 14 aa, Artificial
  helical interface sequence
AKNYGRAVYECLRG

SEQ ID NO: 9966 - protein, 6 aa, Artificial
  helical interface sequence
WTDGLT

SEQ ID NO: 9967 - protein, 15 aa, Artificial
  helical interface sequence
AKNYGRAVYECLRGG

SEQ ID NO: 9968 - protein, 23 aa, Artificial
  helical interface sequence
TSDANVLTNELRLIAQRYLLQYQ

SEQ ID NO: 9969 - protein, 23 aa, Artificial
  helical interface sequence
TSDANVLTNELRLIAQRYLLQYQ

SEQ ID NO: 9970 - protein, 8 aa, Artificial
  helical interface sequence
TLSILDRY

SEQ ID NO: 9971 - protein, 23 aa, Artificial
  helical interface sequence
TSDANVLTNELRLIAQRYLLQYQ

SEQ ID NO: 9972 - protein, 15 aa, Artificial
  helical interface sequence
TGAIAAMLSTILYSR

SEQ ID NO: 9973 - protein, 11 aa, Artificial
  helical interface sequence
AQDLIKEALKR

SEQ ID NO: 9974 - protein, 11 aa, Artificial
  helical interface sequence
GGALLCAIHGA

SEQ ID NO: 9975 - protein, 32 aa, Artificial
  helical interface sequence
AWDAFYLAMFWMLNTIGWVTFYWHWKHLGVWE

SEQ ID NO: 9976 - protein, 7 aa, Artificial
  helical interface sequence
LMGWLRD

SEQ ID NO: 9977 - protein, 12 aa, Artificial
  helical interface sequence
FQVEYAVKAVEN

SEQ ID NO: 9978 - protein, 6 aa, Artificial
  helical interface sequence
ACEYIC

SEQ ID NO: 9979 - protein, 10 aa, Artificial
  helical interface sequence
VLNNLKLREL

SEQ ID NO: 9980 - protein, 6 aa, Artificial
  helical interface sequence
ADVKSS

SEQ ID NO: 9981 - protein, 5 aa, Artificial
  helical interface sequence
DDFLH

SEQ ID NO: 9982 - protein, 10 aa, Artificial
  helical interface sequence
KILHRLLQEG

SEQ ID NO: 9983 - protein, 9 aa, Artificial
  helical interface sequence
MLHTLFQTS

SEQ ID NO: 9984 - protein, 28 aa, Artificial
  helical interface sequence
LSRLADNAWLRADRLNQLAFDTYQEFEE

SEQ ID NO: 9985 - protein, 26 aa, Artificial
  helical interface sequence
TDLLYTIELGHGLNVAECMAHSAMAR

SEQ ID NO: 9986 - protein, 27 aa, Artificial
  helical interface sequence
EPVFWGLFGAGGMWSAIIAPVMILLVG

SEQ ID NO: 9987 - protein, 13 aa, Artificial
  helical interface sequence
SSAIEKLKGYFQT

SEQ ID NO: 9988 - protein, 34 aa, Artificial; identical to SEQ ID NO: 1043
  helical interface sequence

SEQ ID NO: 9989 - protein, 19 aa, Artificial
  helical interface sequence
NEFTTHILEVINAHMVLSK

SEQ ID NO: 9990 - protein, 28 aa, Artificial
  helical interface sequence
GLWQIITICATGAFVSWALREVEICRKL

SEQ ID NO: 9991 - protein, 28 aa, Artificial
  helical interface sequence
GLWLIASFFMFVAVWSWWGRTYLRAQAL

SEQ ID NO: 9992 - protein, 33 aa, Artificial
  helical interface sequence
EEESLAILRRHVMNELLDTERAYVEELLCVLEG

SEQ ID NO: 9993 - protein, 39 aa, Artificial
  helical interface sequence
EEESLAILRRHVMNELLDTERAYVEELLCVLEGYAAEMD

SEQ ID NO: 9994 - protein, 7 aa, Artificial
  helical interface sequence
LRPLSYP

SEQ ID NO: 9995 - protein, 7 aa, Artificial
  helical interface sequence
PEFGQLA

SEQ ID NO: 9996 - protein, 11 aa, Artificial
  helical interface sequence
NDEICEAFRKD

SEQ ID NO: 9997 - protein, 29 aa, Artificial
  helical interface sequence
PEYWDGETRKVKAHSQTHRVDLGTLRGYY

SEQ ID NO: 9998 - protein, 29 aa, Artificial
  helical interface sequence
PEYWDGETRKVKAHSQTHRVDLGTLRGYY

SEQ ID NO: 9999 - protein, 15 aa, Artificial
  helical interface sequence
VKIRIESTVAGSLRS

SEQ ID NO: 10000 - protein, 9 aa, Artificial
  helical interface sequence
VKIRIESTV

SEQ ID NO: 10001 - protein, 14 aa, Artificial
  helical interface sequence
QDYKDMLAKKRDGF

SEQ ID NO: 10002 - protein, 14 aa, Artificial
  helical interface sequence
QDYKDMLAKKRDGF

SEQ ID NO: 10003 - protein, 17 aa, Artificial
  helical interface sequence
ASLTKERGRLVDMMTDS

SEQ ID NO: 10004 - protein, 8 aa, Artificial
  helical interface sequence
LGDYLRAI

SEQ ID NO: 10005 - protein, 6 aa, Artificial
  helical interface sequence
IGCSFY

SEQ ID NO: 10006 - protein, 16 aa, Artificial
  helical interface sequence
VSATDEFIMALSEATG

SEQ ID NO: 10007 - protein, 20 aa, Artificial
  helical interface sequence
VNYFLDGERQLGTRLMELRN

SEQ ID NO: 10008 - protein, 6 aa, Artificial
  helical interface sequence
ARRTRT

SEQ ID NO: 10009 - protein, 5 aa, Artificial
  helical interface sequence
FRQAY

SEQ ID NO: 10010 - protein, 33 aa, Artificial; identical to SEQ ID NO: 3616
  helical interface sequence

SEQ ID NO: 10011 - protein, 13 aa, Artificial
  helical interface sequence
ARPAALFVQEANR

SEQ ID NO: 10012 - protein, 32 aa, Artificial
  helical interface sequence
PASAKYLNTDLNNAFWTQQKYFTPVLGMLFEY

SEQ ID NO: 10013 - protein, 10 aa, Artificial
  helical interface sequence
GAELRHVLAT

SEQ ID NO: 10014 - protein, 13 aa, Artificial
  helical interface sequence
TDHQTQLLYQASA

SEQ ID NO: 10015 - protein, 11 aa, Artificial
  helical interface sequence
RYVAADAIELV

SEQ ID NO: 10016 - protein, 6 aa, Artificial
  helical interface sequence
SEELET

SEQ ID NO: 10017 - protein, 15 aa, Artificial
  helical interface sequence
EEQIAEFKEAFSLFD

SEQ ID NO: 10018 - protein, 8 aa, Artificial
  helical interface sequence
DAMLRALL

SEQ ID NO: 10019 - protein, 18 aa, Artificial
  helical interface sequence
IDDMMFVLQGQWMRLCTS

SEQ ID NO: 10020 - protein, 11 aa, Artificial
  helical interface sequence
KQHIEYARNLG

SEQ ID NO: 10021 - protein, 11 aa, Artificial
  helical interface sequence
STGISVASYLN

SEQ ID NO: 10022 - protein, 32 aa, Artificial; identical to SEQ ID NO: 1080
  helical interface sequence

SEQ ID NO: 10023 - protein, 32 aa, Artificial; identical to SEQ ID NO: 1080
  helical interface sequence

SEQ ID NO: 10024 - protein, 16 aa, Artificial
  helical interface sequence
ADQARELINSWVESQT

SEQ ID NO: 10025 - protein, 15 aa, Artificial
  helical interface sequence
KSVMEELKRIIDDSE

SEQ ID NO: 10026 - protein, 22 aa, Artificial
  helical interface sequence
VGDAQVLVRYMKAELELYRLQR

SEQ ID NO: 10027 - protein, 22 aa, Artificial
  helical interface sequence
VGDAQVLVRYMKAELELYRLQR

SEQ ID NO: 10028 - protein, 5 aa, Artificial
  helical interface sequence
YQNAN

SEQ ID NO: 10029 - protein, 5 aa, Artificial
  helical interface sequence
LEQIA

SEQ ID NO: 10030 - protein, 18 aa, Artificial
  helical interface sequence
WSMYSRLRKMLYLIYVAG

SEQ ID NO: 10031 - protein, 11 aa, Artificial
  helical interface sequence
TCSVTCKNVWT

SEQ ID NO: 10032 - protein, 9 aa, Artificial
  helical interface sequence
LIAFLTDLA

SEQ ID NO: 10033 - protein, 18 aa, Artificial
  helical interface sequence
PVNFKLLSHCLLVTLAAH

SEQ ID NO: 10034 - protein, 7 aa, Artificial
  helical interface sequence
EADAKDL

SEQ ID NO: 10035 - protein, 5 aa, Artificial
  helical interface sequence
YEDRF

SEQ ID NO: 10036 - protein, 21 aa, Artificial
  helical interface sequence
ASTNAVIAAVCATEVFKIATS

SEQ ID NO: 10037 - protein, 11 aa, Artificial
  helical interface sequence
DDYVHEFCRYG

SEQ ID NO: 10038 - protein, 6 aa, Artificial
  helical interface sequence
WTDGLT

SEQ ID NO: 10039 - protein, 6 aa, Artificial
  helical interface sequence
WTDGLT

SEQ ID NO: 10040 - protein, 5 aa, Artificial
  helical interface sequence
SEQLT

SEQ ID NO: 10041 - protein, 15 aa, Artificial
  helical interface sequence
RQLRSSIERVISIFQ

SEQ ID NO: 10042 - protein, 18 aa, Artificial
  helical interface sequence
GPDYRVLVDKSRKVAHTS

SEQ ID NO: 10043 - protein, 15 aa, Artificial
  helical interface sequence
TKLLVSEVAKIMQEA

SEQ ID NO: 10044 - protein, 22 aa, Artificial
  helical interface sequence
APDARVLSNYLRQQCNYSSLVF

SEQ ID NO: 10045 - protein, 6 aa, Artificial
  helical interface sequence
WDFAKD

SEQ ID NO: 10046 - protein, 19 aa, Artificial
  helical interface sequence
LPVIPVLFLALAFVWQAAV

SEQ ID NO: 10047 - protein, 13 aa, Artificial
  helical interface sequence
AKQQVETFLEQLK

SEQ ID NO: 10048 - protein, 19 aa, Artificial
  helical interface sequence
SKLRGHAITLTYALNNFVD

SEQ ID NO: 10049 - protein, 22 aa, Artificial
  helical interface sequence
AQGALANIAVDKANLEIMTKRS

SEQ ID NO: 10050 - protein, 31 aa, Artificial; identical to SEQ ID NO: 1463
  helical interface sequence

SEQ ID NO: 10051 - protein, 20 aa, Artificial
  helical interface sequence
ENLYDDRVFRIKRALDLSMR

SEQ ID NO: 10052 - protein, 15 aa, Artificial
  helical interface sequence
HHERLKCDEWSVTSG

SEQ ID NO: 10053 - protein, 13 aa, Artificial
  helical interface sequence
DLELAVFLSLEWE

SEQ ID NO: 10054 - protein, 7 aa, Artificial
  helical interface sequence
EYEVVST

SEQ ID NO: 10055 - protein, 12 aa, Artificial
  helical interface sequence
SVMPAEVAWAVG

SEQ ID NO: 10056 - protein, 11 aa, Artificial
  helical interface sequence
PRHILLAVAND

SEQ ID NO: 10057 - protein, 9 aa, Artificial
  helical interface sequence
PEEVEEVIG

SEQ ID NO: 10058 - protein, 7 aa, Artificial
  helical interface sequence
RPYWRCY

SEQ ID NO: 10059 - protein, 21 aa, Artificial
  helical interface sequence
TRNCWQNYLDFHRCEKAMTAK

SEQ ID NO: 10060 - protein, 25 aa, Artificial
  helical interface sequence
PKEQAIGLSVTFLSFLLPAGWVLYH

SEQ ID NO: 10061 - protein, 21 aa, Artificial
  helical interface sequence
TRNCWQNYLDFHRCEKAMTAK

SEQ ID NO: 10062 - protein, 5 aa, Artificial
  helical interface sequence
FHDKY

SEQ ID NO: 10063 - protein, 18 aa, Artificial
  helical interface sequence
VDFVRKAVRAIGRCAIKV

SEQ ID NO: 10064 - protein, 8 aa, Artificial
  helical interface sequence
DINRNFLF

SEQ ID NO: 10065 - protein, 25 aa, Artificial
  helical interface sequence
PEGLREVALKSVEMAHKLHALLLEV

SEQ ID NO: 10066 - protein, 16 aa, Artificial
  helical interface sequence
KETLEAFAEAMGALLK

SEQ ID NO: 10067 - protein, 15 aa, Artificial
  helical interface sequence
FLALVRAWAYIRTLG

SEQ ID NO: 10068 - protein, 15 aa, Artificial
  helical interface sequence
KETLEAFAEAMGALL

SEQ ID NO: 10069 - protein, 19 aa, Artificial
  helical interface sequence
SEMQRLTKYPLLLESIIKH

SEQ ID NO: 10070 - protein, 15 aa, Artificial
  helical interface sequence
SLEKQKGVTNLLIKY

SEQ ID NO: 10071 - protein, 15 aa, Artificial
  helical interface sequence
SLEKQKGVTNLLIKY

SEQ ID NO: 10072 - protein, 9 aa, Artificial
  helical interface sequence
VDQMIREAD

SEQ ID NO: 10073 - protein, 17 aa, Artificial
  helical interface sequence
KKQRQTLRKMVIDMVLA

SEQ ID NO: 10074 - protein, 15 aa, Artificial
  helical interface sequence
VLENHHLAVGFKLLQ

SEQ ID NO: 10075 - protein, 20 aa, Artificial
  helical interface sequence
GEDFDNRLVNHFVEEFKRKH

SEQ ID NO: 10076 - protein, 6 aa, Artificial
  helical interface sequence
TFLMEM

SEQ ID NO: 10077 - protein, 8 aa, Artificial
  helical interface sequence
RKKWIHCF

SEQ ID NO: 10078 - protein, 20 aa, Artificial
  helical interface sequence
RFCSAIREVYEQLYDTLDIT

SEQ ID NO: 10079 - protein, 23 aa, Artificial
  helical interface sequence
VGDAQVLVRYMKAELELYRLQRR

SEQ ID NO: 10080 - protein, 12 aa, Artificial
  helical interface sequence
SVWIGGSILASL

SEQ ID NO: 10081 - protein, 10 aa, Artificial
  helical interface sequence
PLLQGRLFSY

SEQ ID NO: 10082 - protein, 19 aa, Artificial
  helical interface sequence
PLLQGRLFSYTDTQISRLG

SEQ ID NO: 10083 - protein, 13 aa, Artificial
  helical interface sequence
PYIRERVVDQLAH

SEQ ID NO: 10084 - protein, 10 aa, Artificial
  helical interface sequence
IFIPRLLMVD

SEQ ID NO: 10085 - protein, 6 aa, Artificial
  helical interface sequence
IADIQG

SEQ ID NO: 10086 - protein, 13 aa, Artificial
  helical interface sequence
KIQVIKVVREITG

SEQ ID NO: 10087 - protein, 22 aa, Artificial
  helical interface sequence
TFGLMCKMADQTLFSIVEWARS

SEQ ID NO: 10088 - protein, 26 aa, Artificial
  helical interface sequence
AASLHWTSERAVSALLLGLLPAAYLY

SEQ ID NO: 10089 - protein, 7 aa, Artificial
  helical interface sequence
RFAKLLL

SEQ ID NO: 10090 - protein, 35 aa, Artificial; identical to SEQ ID NO: 5251
  helical interface sequence

SEQ ID NO: 10091 - protein, 10 aa, Artificial
  helical interface sequence
PNDVITFLEH

SEQ ID NO: 10092 - protein, 15 aa, Artificial
  helical interface sequence
INSAARNIQHLLYGK

SEQ ID NO: 10093 - protein, 21 aa, Artificial
  helical interface sequence
IPDARNAALRAKAEAAEFRYK

SEQ ID NO: 10094 - protein, 5 aa, Artificial
  helical interface sequence
MEMYQ

SEQ ID NO: 10095 - protein, 12 aa, Artificial
  helical interface sequence
PKDIQLARRIRG

SEQ ID NO: 10096 - protein, 13 aa, Artificial
  helical interface sequence
TVALREIRRYQKS

SEQ ID NO: 10097 - protein, 13 aa, Artificial
  helical interface sequence
TVALREIRRYQKS

SEQ ID NO: 10098 - protein, 12 aa, Artificial
  helical interface sequence
SREIQTAVRLLL

SEQ ID NO: 10099 - protein, 10 aa, Artificial
  helical interface sequence
PRHLQLAVRN

SEQ ID NO: 10100 - protein, 5 aa, Artificial
  helical interface sequence
KSKLT

SEQ ID NO: 10101 - protein, 12 aa, Artificial
  helical interface sequence
AIYVYKVLKQVH

SEQ ID NO: 10102 - protein, 6 aa, Artificial
  helical interface sequence
TDLIYY

SEQ ID NO: 10103 - protein, 14 aa, Artificial
  helical interface sequence
MATRQEINAACVAL

SEQ ID NO: 10104 - protein, 12 aa, Artificial
  helical interface sequence
LGNWVCAAKFES

SEQ ID NO: 10105 - protein, 8 aa, Artificial
  helical interface sequence
IMGLMSLA

SEQ ID NO: 10106 - protein, 35 aa, Artificial
  helical interface sequence
KEYKDAKDKLMTRILGEDQYLLERKKVQYEEYKKL

SEQ ID NO: 10107 - protein, 6 aa, Artificial
  helical interface sequence
EDLVAK

SEQ ID NO: 10108 - protein, 16 aa, Artificial
  helical interface sequence
PWKRQIDLALLQFVGD

SEQ ID NO: 10109 - protein, 8 aa, Artificial
  helical interface sequence
PEQREKLD

SEQ ID NO: 10110 - protein, 16 aa, Artificial
  helical interface sequence
GVDAVIKAYRLYLEQC

SEQ ID NO: 10111 - protein, 26 aa, Artificial
  helical interface sequence
KRWLHFFMLFVPVTGLWMSAIGVVGL

SEQ ID NO: 10112 - protein, 16 aa, Artificial
  helical interface sequence
PRGWFTFAHAVFALLF

SEQ ID NO: 10113 - protein, 26 aa, Artificial
  helical interface sequence
KRWLHFFMLFVPVTGLWMSAIGVVGL

SEQ ID NO: 10114 - protein, 6 aa, Artificial
  helical interface sequence
RYQWDS

SEQ ID NO: 10115 - protein, 10 aa, Artificial
  helical interface sequence
ISQEIRAAED

SEQ ID NO: 10116 - protein, 21 aa, Artificial
  helical interface sequence
RTSLYLGLLLILVLALLFSSY

SEQ ID NO: 10117 - protein, 21 aa, Artificial
  helical interface sequence
RTSLYLGLLLILVLALLFSSY

SEQ ID NO: 10118 - protein, 22 aa, Artificial
  helical interface sequence
EKLFDELLDVSINCARKLREKF

SEQ ID NO: 10119 - protein, 16 aa, Artificial
  helical interface sequence
RRSIEISKVSKEAFEA

SEQ ID NO: 10120 - protein, 18 aa, Artificial
  helical interface sequence
RDAIKRIAYEFVEMKAKD

SEQ ID NO: 10121 - protein, 18 aa, Artificial
  helical interface sequence
NSMRAILVDWLVEVGEEY

SEQ ID NO: 10122 - protein, 8 aa, Artificial
  helical interface sequence
EAEISHTQ

SEQ ID NO: 10123 - protein, 23 aa, Artificial
  helical interface sequence
EWTQLDMFYRNWALKESFIKAIG

SEQ ID NO: 10124 - protein, 7 aa, Artificial
  helical interface sequence
NLCRKQQ

SEQ ID NO: 10125 - protein, 17 aa, Artificial
  helical interface sequence
RATCDSLLSHLNAQHRA

SEQ ID NO: 10126 - protein, 6 aa, Artificial
  helical interface sequence
VNSIDY

SEQ ID NO: 10127 - protein, 14 aa, Artificial
  helical interface sequence
GIPSYYVIASSEAS

SEQ ID NO: 10128 - protein, 16 aa, Artificial
  helical interface sequence
SCQSELHRALERLAAS

SEQ ID NO: 10129 - protein, 11 aa, Artificial
  helical interface sequence
RQFLTQLMQKE

SEQ ID NO: 10130 - protein, 7 aa, Artificial
  helical interface sequence
VKKVMAG

SEQ ID NO: 10131 - protein, 35 aa, Artificial; identical to SEQ ID NO: 1058
  helical interface sequence

SEQ ID NO: 10132 - protein, 9 aa, Artificial
  helical interface sequence
AAEVEFLAE

SEQ ID NO: 10133 - protein, 46 aa, Artificial
  helical interface sequence
EEEADKLNKEVEDLTASLFDEANNMVADARKEKYAIEILNKRLTEQ

SEQ ID NO: 10134 - protein, 26 aa, Artificial
  helical interface sequence
PDERAQQAALHAQQDAVTKIADLQKA

SEQ ID NO: 10135 - protein, 12 aa, Artificial
  helical interface sequence
PKDIQLARRIRG

SEQ ID NO: 10136 - protein, 23 aa, Artificial
  helical interface sequence
AAVAVEFARLYAVELEHYEKLEG

SEQ ID NO: 10137 - protein, 7 aa, Artificial
  helical interface sequence
DEQLKSG

SEQ ID NO: 10138 - protein, 8 aa, Artificial
  helical interface sequence
FMDVYQRS

SEQ ID NO: 10139 - protein, 23 aa, Artificial
  helical interface sequence
KESTQKAIDGVTNKVNSIIDKMN

SEQ ID NO: 10140 - protein, 14 aa, Artificial
  helical interface sequence
RERETILDLFEWVT

SEQ ID NO: 10141 - protein, 8 aa, Artificial
  helical interface sequence
CCAIEMMA

SEQ ID NO: 10142 - protein, 6 aa, Artificial
  helical interface sequence
PELASG

SEQ ID NO: 10143 - protein, 28 aa, Artificial
  helical interface sequence
ALTVAATEVRRIRDRAIQSDAQVAPMTT

SEQ ID NO: 10144 - protein, 7 aa, Artificial
  helical interface sequence
GEEIIRA

SEQ ID NO: 10145 - protein, 7 aa, Artificial
  helical interface sequence
GEEIIRA

SEQ ID NO: 10146 - protein, 14 aa, Artificial
  helical interface sequence
FGVTLGNPLRRILL

SEQ ID NO: 10147 - protein, 19 aa, Artificial
  helical interface sequence
HFAVTLEHFLESALDESFG

SEQ ID NO: 10148 - protein, 16 aa, Artificial
  helical interface sequence
HFAVTLEHFLESALDE

SEQ ID NO: 10149 - protein, 12 aa, Artificial
  helical interface sequence
QRFLTQALHYNT

SEQ ID NO: 10150 - protein, 17 aa, Artificial
  helical interface sequence
PEHFVSEIDARVTKIEG

SEQ ID NO: 10151 - protein, 15 aa, Artificial
  helical interface sequence
MDKINNRFNYLFEVN

SEQ ID NO: 10152 - protein, 14 aa, Artificial
  helical interface sequence
LSVYQKMKFNVAMG

SEQ ID NO: 10153 - protein, 18 aa, Artificial
  helical interface sequence
KKKNVLHERMEQSILPLF

SEQ ID NO: 10154 - protein, 18 aa, Artificial
  helical interface sequence
ISVCNNATWAIGEISIQM

SEQ ID NO: 10155 - protein, 9 aa, Artificial
  helical interface sequence
ICLRELAHK

SEQ ID NO: 10156 - protein, 12 aa, Artificial
  helical interface sequence
VFYLHSRLLERA

SEQ ID NO: 10157 - protein, 14 aa, Artificial
  helical interface sequence
RSTVAQLVQTLEQH

SEQ ID NO: 10158 - protein, 7 aa, Artificial
  helical interface sequence
SEQLTSG

SEQ ID NO: 10159 - protein, 12 aa, Artificial
  helical interface sequence
SHEVVAWIKKIL

SEQ ID NO: 10160 - protein, 18 aa, Artificial
  helical interface sequence
LAWKIAKMIVSDVMQQCK

SEQ ID NO: 10161 - protein, 11 aa, Artificial
  helical interface sequence
LGQLVEAAIQA

SEQ ID NO: 10162 - protein, 6 aa, Artificial
  helical interface sequence
DGVYQL

SEQ ID NO: 10163 - protein, 11 aa, Artificial
  helical interface sequence
VGEDIRKLDYG

SEQ ID NO: 10164 - protein, 13 aa, Artificial
  helical interface sequence
DDIRILRDIEQYY

SEQ ID NO: 10165 - protein, 6 aa, Artificial
  helical interface sequence
PALVFN

SEQ ID NO: 10166 - protein, 17 aa, Artificial
  helical interface sequence
TSQMAKDVTTFLNWCAE

SEQ ID NO: 10167 - protein, 15 aa, Artificial
  helical interface sequence
ESVLNVIAADVTLVG

SEQ ID NO: 10168 - protein, 12 aa, Artificial
  helical interface sequence
DIRILRDIEQYY

SEQ ID NO: 10169 - protein, 10 aa, Artificial
  helical interface sequence
KTTILYKLKL

SEQ ID NO: 10170 - protein, 14 aa, Artificial
  helical interface sequence
TAVERAALFWRWTI

SEQ ID NO: 10171 - protein, 27 aa, Artificial
  helical interface sequence
LQDIDQAENTARSTAVKLLEELKKHLG

SEQ ID NO: 10172 - protein, 7 aa, Artificial
  helical interface sequence
ELEQIAD

SEQ ID NO: 10173 - protein, 17 aa, Artificial
  helical interface sequence
LLEEDKICGYVAGGLMY

SEQ ID NO: 10174 - protein, 13 aa, Artificial
  helical interface sequence
DMKRTINKAWVES

SEQ ID NO: 10175 - protein, 17 aa, Artificial
  helical interface sequence
YLHRMTTLFCINVLSEV

SEQ ID NO: 10176 - protein, 21 aa, Artificial
  helical interface sequence
DEEMKAMLSYYYSTVMEQQVN

SEQ ID NO: 10177 - protein, 19 aa, Artificial
  helical interface sequence
KASYENVAKKWIPELRHYA

SEQ ID NO: 10178 - protein, 11 aa, Artificial
  helical interface sequence
STTMRRLIDTY

SEQ ID NO: 10179 - protein, 29 aa, Artificial
  helical interface sequence
SKAMSIMNSFVNDVFERIAGEASRLAHYN

SEQ ID NO: 10180 - protein, 18 aa, Artificial
  helical interface sequence
NQHLCGSHLVEALYLVCG

SEQ ID NO: 10181 - protein, 8 aa, Artificial
  helical interface sequence
ADLQHSIN

SEQ ID NO: 10182 - protein, 6 aa, Artificial
  helical interface sequence
GILQKF

SEQ ID NO: 10183 - protein, 10 aa, Artificial
  helical interface sequence
VKQASHLLKY

SEQ ID NO: 10184 - protein, 12 aa, Artificial
  helical interface sequence
TVKHLLDAAARG

SEQ ID NO: 10185 - protein, 15 aa, Artificial
  helical interface sequence
RRECLYYLTIGCYKL

SEQ ID NO: 10186 - protein, 9 aa, Artificial
  helical interface sequence
AYSYIRDAW

SEQ ID NO: 10187 - protein, 12 aa, Artificial
  helical interface sequence
MQDLKDVTNNVH

SEQ ID NO: 10188 - protein, 8 aa, Artificial
  helical interface sequence
RPRFERVL

SEQ ID NO: 10189 - protein, 19 aa, Artificial
  helical interface sequence
IPMAEKKLAQIGDEINEKW

SEQ ID NO: 10190 - protein, 7 aa, Artificial
  helical interface sequence
IEEDFNA

SEQ ID NO: 10191 - protein, 7 aa, Artificial
  helical interface sequence
DEQLKSG

SEQ ID NO: 10192 - protein, 14 aa, Artificial
  helical interface sequence
PSVIKGIAQQAVGA

SEQ ID NO: 10193 - protein, 10 aa, Artificial
  helical interface sequence
ASIGLGLLGK

SEQ ID NO: 10194 - protein, 5 aa, Artificial
  helical interface sequence
SYDVL

SEQ ID NO: 10195 - protein, 6 aa, Artificial
  helical interface sequence
PWTQRH

SEQ ID NO: 10196 - protein, 18 aa, Artificial
  helical interface sequence
VSQVSNWFGNKRIRYKKN

SEQ ID NO: 10197 - protein, 11 aa, Artificial
  helical interface sequence
PWAWSNIDTSK

SEQ ID NO: 10198 - protein, 15 aa, Artificial
  helical interface sequence
IALHVWTIKGYFETI

SEQ ID NO: 10199 - protein, 19 aa, Artificial
  helical interface sequence
PVNFKLLSHCLLVTLANHH

SEQ ID NO: 10200 - protein, 20 aa, Artificial
  helical interface sequence
PENFRLLGNVLVIVLSHHFG

SEQ ID NO: 10201 - protein, 7 aa, Artificial
  helical interface sequence
DRLRPLS

SEQ ID NO: 10202 - protein, 17 aa, Artificial
  helical interface sequence
STVTRALRDLMQGILQK

SEQ ID NO: 10203 - protein, 7 aa, Artificial
  helical interface sequence
QVAMAAP

SEQ ID NO: 10204 - protein, 7 aa, Artificial
  helical interface sequence
PPCILNN

SEQ ID NO: 10205 - protein, 12 aa, Artificial
  helical interface sequence
SQAACYELTMEY

SEQ ID NO: 10206 - protein, 15 aa, Artificial
  helical interface sequence
FVSDIKQEAAYRAAN

SEQ ID NO: 10207 - protein, 9 aa, Artificial
  helical interface sequence
QAVLSLYAS

SEQ ID NO: 10208 - protein, 10 aa, Artificial
  helical interface sequence
NVLQLKLQQR

SEQ ID NO: 10209 - protein, 14 aa, Artificial
  helical interface sequence
EEVWYRVIQIVINR

SEQ ID NO: 10210 - protein, 7 aa, Artificial
  helical interface sequence
REAAMRG

SEQ ID NO: 10211 - protein, 18 aa, Artificial
  helical interface sequence
PQALTEFRSYLDYVINAL

SEQ ID NO: 10212 - protein, 12 aa, Artificial
  helical interface sequence
VLTKAIVNADAE

SEQ ID NO: 10213 - protein, 12 aa, Artificial
  helical interface sequence
AFTKAIVAADLR

SEQ ID NO: 10214 - protein, 10 aa, Artificial
  helical interface sequence
ETAYGLLTAE

SEQ ID NO: 10215 - protein, 13 aa, Artificial
  helical interface sequence
KYHLLLQELVKHT

SEQ ID NO: 10216 - protein, 17 aa, Artificial
  helical interface sequence
LGQIMEGIAGKYAALSG

SEQ ID NO: 10217 - protein, 5 aa, Artificial
  helical interface sequence
LPSRM

SEQ ID NO: 10218 - protein, 8 aa, Artificial
  helical interface sequence
IGIVAAQS

SEQ ID NO: 10219 - protein, 17 aa, Artificial
  helical interface sequence
RYEIARVISARALQLAM

SEQ ID NO: 10220 - protein, 9 aa, Artificial
  helical interface sequence
RPDAEYWNS

SEQ ID NO: 10221 - protein, 7 aa, Artificial
  helical interface sequence
LDDMEEM

SEQ ID NO: 10222 - protein, 17 aa, Artificial
  helical interface sequence
EYQNEKLANELKSLLDE

SEQ ID NO: 10223 - protein, 21 aa, Artificial
  helical interface sequence
TYYKRTIKISGQKAMYALKSK

SEQ ID NO: 10224 - protein, 35 aa, Artificial; identical to SEQ ID NO: 1457
  helical interface sequence

SEQ ID NO: 10225 - protein, 8 aa, Artificial
  helical interface sequence
EEYLKNSA

SEQ ID NO: 10226 - protein, 19 aa, Artificial
  helical interface sequence
PDLAKRYVELALEIQKKAK

SEQ ID NO: 10227 - protein, 22 aa, Artificial
  helical interface sequence
IPDGRHLVNRGREEAASFKKLY

SEQ ID NO: 10228 - protein, 15 aa, Artificial
  helical interface sequence
TETAASVFKELCYEN

SEQ ID NO: 10229 - protein, 19 aa, Artificial
  helical interface sequence
TEEGLDLLKLCVQELEKRM

SEQ ID NO: 10230 - protein, 22 aa, Artificial
  helical interface sequence
TADARSMIEHARTAAVTHNLYY

SEQ ID NO: 10231 - protein, 19 aa, Artificial
  helical interface sequence
TEEGLDLLKLCVQELEKRM

SEQ ID NO: 10232 - protein, 5 aa, Artificial
  helical interface sequence
QYLKD

SEQ ID NO: 10233 - protein, 8 aa, Artificial
  helical interface sequence
RGELLRGI

SEQ ID NO: 10234 - protein, 9 aa, Artificial
  helical interface sequence
LNAATYEYR

SEQ ID NO: 10235 - protein, 28 aa, Artificial
  helical interface sequence
PRSWLATSHFVLAFFFLVGHLWHAGRAR

SEQ ID NO: 10236 - protein, 6 aa, Artificial
  helical interface sequence
LWERFC

SEQ ID NO: 10237 - protein, 11 aa, Artificial
  helical interface sequence
ICSTIEELRRQ

SEQ ID NO: 10238 - protein, 12 aa, Artificial
  helical interface sequence
SCHMRQATCFLG

SEQ ID NO: 10239 - protein, 8 aa, Artificial
  helical interface sequence
KINLLGFL

SEQ ID NO: 10240 - protein, 12 aa, Artificial
  helical interface sequence
ELFMLRLQKSAR

SEQ ID NO: 10241 - protein, 21 aa, Artificial
  helical interface sequence
EAYLQQVQDLVILESIILQTL

SEQ ID NO: 10242 - protein, 19 aa, Artificial
  helical interface sequence
FKEKLKWTGIVLVLYFIMG

SEQ ID NO: 10243 - protein, 16 aa, Artificial
  helical interface sequence
ITLQEIIKTLNSLTEQ

SEQ ID NO: 10244 - protein, 22 aa, Artificial
  helical interface sequence
NVRAQLVDMKRLEVDIDIKIRS

SEQ ID NO: 10245 - protein, 10 aa, Artificial
  helical interface sequence
IKLARSLFKT

SEQ ID NO: 10246 - protein, 17 aa, Artificial
  helical interface sequence
ANVRFNVAKSLQKIGPI

SEQ ID NO: 10247 - protein, 14 aa, Artificial
  helical interface sequence
VDVKYFAQEALTVL

SEQ ID NO: 10248 - protein, 5 aa, Artificial
  helical interface sequence
YFYSE

SEQ ID NO: 10249 - protein, 23 aa, Artificial
  helical interface sequence
VADARVLVDFARISAQQEKVTYG

SEQ ID NO: 10250 - protein, 23 aa, Artificial
  helical interface sequence
VADARVLVDFARISAQQEKVTYG

SEQ ID NO: 10251 - protein, 12 aa, Artificial
  helical interface sequence
SVWIGGSILASL

SEQ ID NO: 10252 - protein, 8 aa, Artificial
  helical interface sequence
PVGPALGQ

SEQ ID NO: 10253 - protein, 12 aa, Artificial
  helical interface sequence
RRVAEIESEMNE

SEQ ID NO: 10254 - protein, 8 aa, Artificial
  helical interface sequence
SWLHEINS

SEQ ID NO: 10255 - protein, 25 aa, Artificial
  helical interface sequence
LEDQKKIKRRLETLLRNIDNSDKAI

SEQ ID NO: 10256 - protein, 12 aa, Artificial
  helical interface sequence
GVEKIKEVISKA

SEQ ID NO: 10257 - protein, 12 aa, Artificial
  helical interface sequence
ALKLVRESELLG

SEQ ID NO: 10258 - protein, 8 aa, Artificial
  helical interface sequence
SLYKTFFK

SEQ ID NO: 10259 - protein, 16 aa, Artificial
  helical interface sequence
YKVAINEAIELAKSFG

SEQ ID NO: 10260 - protein, 18 aa, Artificial
  helical interface sequence
WTQCQQLSQKLCTLAWSA

SEQ ID NO: 10261 - protein, 7 aa, Artificial
  helical interface sequence
PQGLRDN

SEQ ID NO: 10262 - protein, 13 aa, Artificial
  helical interface sequence
KAEVAAEFLNDRV

SEQ ID NO: 10263 - protein, 13 aa, Artificial
  helical interface sequence
TAAMEKLKAYFAT

SEQ ID NO: 10264 - protein, 13 aa, Artificial
  helical interface sequence
TAAMEKLKAYFAT

SEQ ID NO: 10265 - protein, 19 aa, Artificial
  helical interface sequence
PVNFKLLGHCFLVVVAVHF

SEQ ID NO: 10266 - protein, 19 aa, Artificial
  helical interface sequence
PVNFKLLGHCFLVVVAVHF

SEQ ID NO: 10267 - protein, 27 aa, Artificial
  helical interface sequence
PLLAFLVIIQIAFGSIILIYLDEIVSK

SEQ ID NO: 10268 - protein, 39 aa, Artificial
  helical interface sequence
KEQMREFEKVIVLRAVDSKWMDHIDAMDQLRQGIHLRAY

SEQ ID NO: 10269 - protein, 14 aa, Artificial
  helical interface sequence
FNLKEQYEIYKEKE

SEQ ID NO: 10270 - protein, 17 aa, Artificial
  helical interface sequence
WTQCQQLSQKLCTLAWS

SEQ ID NO: 10271 - protein, 23 aa, Artificial
  helical interface sequence
PAEVEALREKVYASLEAYCKHKY

SEQ ID NO: 10272 - protein, 18 aa, Artificial
  helical interface sequence
KAVDWWALGVLIYEMAAG

SEQ ID NO: 10273 - protein, 15 aa, Artificial
  helical interface sequence
MKEVLFYLGQYIMTK

SEQ ID NO: 10274 - protein, 13 aa, Artificial
  helical interface sequence
LLDELYQRFDAAI

SEQ ID NO: 10275 - protein, 14 aa, Artificial
  helical interface sequence
EMGFAGIAVGAAMA

SEQ ID NO: 10276 - protein, 6 aa, Artificial
  helical interface sequence
KILEDN

SEQ ID NO: 10277 - protein, 5 aa, Artificial
  helical interface sequence
TYYMS

SEQ ID NO: 10278 - protein, 7 aa, Artificial
  helical interface sequence
FNFSMQA

SEQ ID NO: 10279 - protein, 19 aa, Artificial
  helical interface sequence
PKLTLGLIWTIILHFQISD

SEQ ID NO: 10280 - protein, 21 aa, Artificial
  helical interface sequence
WGRIVAFFSFGGALCVESVDK

SEQ ID NO: 10281 - protein, 15 aa, Artificial
  helical interface sequence
SDQVIEEMLDTAHYV

SEQ ID NO: 10282 - protein, 9 aa, Artificial
  helical interface sequence
MFSHLRRIG

SEQ ID NO: 10283 - protein, 24 aa, Artificial
  helical interface sequence
FRKARETLFAAGNYAYAHRKRRKR

SEQ ID NO: 10284 - protein, 12 aa, Artificial
  helical interface sequence
VFYLHSRLLERA

SEQ ID NO: 10285 - protein, 11 aa, Artificial
  helical interface sequence
ENEFIAICTDS

SEQ ID NO: 10286 - protein, 16 aa, Artificial
  helical interface sequence
NYELISNELKARLLQE

SEQ ID NO: 10287 - protein, 16 aa, Artificial
  helical interface sequence
NYELISNELKARLLQE

SEQ ID NO: 10288 - protein, 8 aa, Artificial
  helical interface sequence
AAELRHVM

SEQ ID NO: 10289 - protein, 16 aa, Artificial
  helical interface sequence
FANMQFLGLAADAAEA

SEQ ID NO: 10290 - protein, 22 aa, Artificial
  helical interface sequence
YPEYVSIQREKDAGAYSVKAAL

SEQ ID NO: 10291 - protein, 13 aa, Artificial
  helical interface sequence
VNLKEKVAQLEAQ

SEQ ID NO: 10292 - protein, 25 aa, Artificial
  helical interface sequence
TCGIADFLSTYQTKVDKDLQSLEDI

SEQ ID NO: 10293 - protein, 20 aa, Artificial
  helical interface sequence
APARLHWLATLLMDALKRHH

SEQ ID NO: 10294 - protein, 9 aa, Artificial
  helical interface sequence
RRDWQLQQL

SEQ ID NO: 10295 - protein, 17 aa, Artificial
  helical interface sequence
PTDIQLYYQTLLIGRKE

SEQ ID NO: 10296 - protein, 31 aa, Artificial
  helical interface sequence
SSSRTEIEGTQKLLNKDLAELINKMRLAQQN

SEQ ID NO: 10297 - protein, 6 aa, Artificial
  helical interface sequence
SEELQA

SEQ ID NO: 10298 - protein, 30 aa, Artificial
  helical interface sequence
TKRALIQCAKDIAKASDEVTRLAKEVAKQC

SEQ ID NO: 10299 - protein, 9 aa, Artificial
  helical interface sequence
LLSNILHSS

SEQ ID NO: 10300 - protein, 10 aa, Artificial
  helical interface sequence
MEIWSNRIER

SEQ ID NO: 10301 - protein, 54 aa, Artificial; identical to SEQ ID NO: 4995
  helical interface sequence

SEQ ID NO: 10302 - protein, 10 aa, Artificial
  helical interface sequence
DNTLFKWMIF

SEQ ID NO: 10303 - protein, 10 aa, Artificial
  helical interface sequence
KEVFAQFRAN

SEQ ID NO: 10304 - protein, 10 aa, Artificial
  helical interface sequence
PARLMETLRT

SEQ ID NO: 10305 - protein, 18 aa, Artificial
  helical interface sequence
AIEEAESLLQFHVATYMD

SEQ ID NO: 10306 - protein, 16 aa, Artificial
  helical interface sequence
VAHLIECLLSKVAALS

SEQ ID NO: 10307 - protein, 7 aa, Artificial
  helical interface sequence
ESDLYKL

SEQ ID NO: 10308 - protein, 8 aa, Artificial
  helical interface sequence
REESTTVS

SEQ ID NO: 10309 - protein, 8 aa, Artificial
  helical interface sequence
REESTTVS

SEQ ID NO: 10310 - protein, 16 aa, Artificial
  helical interface sequence
KSLSALGNVISALAEG

SEQ ID NO: 10311 - protein, 15 aa, Artificial
  helical interface sequence
AKNYGRAVYECLRGG

SEQ ID NO: 10312 - protein, 50 aa, Artificial; identical to SEQ ID NO: 1130
  helical interface sequence

SEQ ID NO: 10313 - protein, 21 aa, Artificial
  helical interface sequence
QAAMQMLKETINEEAAEWDRL

SEQ ID NO: 10314 - protein, 13 aa, Artificial
  helical interface sequence
VKELIQQAIAKIG

SEQ ID NO: 10315 - protein, 25 aa, Artificial
  helical interface sequence
TRRYAACIRDLDYYLRYATYAMLAG

SEQ ID NO: 10316 - protein, 12 aa, Artificial
  helical interface sequence
IVTKSIVNADAE

SEQ ID NO: 10317 - protein, 13 aa, Artificial
  helical interface sequence
TAALEKLKSYFST

SEQ ID NO: 10318 - protein, 27 aa, Artificial
  helical interface sequence
SSDLESIQGNIQRAAARLEAAQKLSGN

SEQ ID NO: 10319 - protein, 5 aa, Artificial
  helical interface sequence
TEQLA

SEQ ID NO: 10320 - protein, 36 aa, Artificial; identical to SEQ ID NO: 312
  helical interface sequence

SEQ ID NO: 10321 - protein, 14 aa, Artificial
  helical interface sequence
GRNYGRVVYEGLKG

SEQ ID NO: 10322 - protein, 22 aa, Artificial
  helical interface sequence
IQAGATANRVALEAMVLARNEG

SEQ ID NO: 10323 - protein, 19 aa, Artificial
  helical interface sequence
PDSLENIPEKWTPEVKHFC

SEQ ID NO: 10324 - protein, 10 aa, Artificial
  helical interface sequence
EIREAFRVFD

SEQ ID NO: 10325 - protein, 14 aa, Artificial
  helical interface sequence
YSGIVSGIEWATTN

SEQ ID NO: 10326 - protein, 16 aa, Artificial
  helical interface sequence
ATLWNCRREVLQHLET

SEQ ID NO: 10327 - protein, 9 aa, Artificial
  helical interface sequence
LKEAKDLVE

SEQ ID NO: 10328 - protein, 13 aa, Artificial
  helical interface sequence
QDQRIGLSVIQRN

SEQ ID NO: 10329 - protein, 9 aa, Artificial
  helical interface sequence
KNFLEASYD

SEQ ID NO: 10330 - protein, 10 aa, Artificial
  helical interface sequence
NVQRLAEPSQ

SEQ ID NO: 10331 - protein, 9 aa, Artificial
  helical interface sequence
IKELREMIQ

SEQ ID NO: 10332 - protein, 9 aa, Artificial
  helical interface sequence
QEICEYFAG

SEQ ID NO: 10333 - protein, 6 aa, Artificial
  helical interface sequence
LMEIAE

SEQ ID NO: 10334 - protein, 9 aa, Artificial
  helical interface sequence
KYLSQQWAK

SEQ ID NO: 10335 - protein, 11 aa, Artificial
  helical interface sequence
SGIRILLNEVF

SEQ ID NO: 10336 - protein, 13 aa, Artificial
  helical interface sequence
STAIREISLLKEL

SEQ ID NO: 10337 - protein, 16 aa, Artificial
  helical interface sequence
WYIQSLCQSLRERCPR

SEQ ID NO: 10338 - protein, 11 aa, Artificial
  helical interface sequence
TSLIHSLIEES

SEQ ID NO: 10339 - protein, 18 aa, Artificial
  helical interface sequence
ENFKLLGNVLVTVLAIHF

SEQ ID NO: 10340 - protein, 11 aa, Artificial
  helical interface sequence
RYIAADAVEAV

SEQ ID NO: 10341 - protein, 24 aa, Artificial
  helical interface sequence
KGFEKIGNDIQILKSSINIAIEKL

SEQ ID NO: 10342 - protein, 22 aa, Artificial
  helical interface sequence
ADCQFWETWLGSQCRLHELREK

SEQ ID NO: 10343 - protein, 22 aa, Artificial
  helical interface sequence
TADARSMIEHARTAAVTHNLYY

SEQ ID NO: 10344 - protein, 22 aa, Artificial
  helical interface sequence
ADCQFWETWLGSQCRLHELREK

SEQ ID NO: 10345 - protein, 11 aa, Artificial
  helical interface sequence
FGAHMANPLLR

SEQ ID NO: 10346 - protein, 22 aa, Artificial
  helical interface sequence
ADCQFWETWLGSQCRLHELREK

SEQ ID NO: 10347 - protein, 22 aa, Artificial
  helical interface sequence
DAAQTHIYMLMKKDSYARYLKS

SEQ ID NO: 10348 - protein, 10 aa, Artificial
  helical interface sequence
EEEEAQVRKE

SEQ ID NO: 10349 - protein, 8 aa, Artificial
  helical interface sequence
PEEIRKTF

SEQ ID NO: 10350 - protein, 8 aa, Artificial
  helical interface sequence
KRWYRLAS

SEQ ID NO: 10351 - protein, 8 aa, Artificial
  helical interface sequence
PEEIRKTF

SEQ ID NO: 10352 - protein, 19 aa, Artificial
  helical interface sequence
PAVHASLDKFLANVSTVLT

SEQ ID NO: 10353 - protein, 22 aa, Artificial
  helical interface sequence
AGDTVQFAEYIQANIQLYSIRE

SEQ ID NO: 10354 - protein, 22 aa, Artificial
  helical interface sequence
AGDTVQFAEYIQANIQLYSIRE

SEQ ID NO: 10355 - protein, 16 aa, Artificial
  helical interface sequence
KPEWEAVVAKYRPRLE

SEQ ID NO: 10356 - protein, 8 aa, Artificial
  helical interface sequence
VIHDAARA

SEQ ID NO: 10357 - protein, 16 aa, Artificial
  helical interface sequence
ADAFTLFELFERKLEM

SEQ ID NO: 10358 - protein, 5 aa, Artificial
  helical interface sequence
LSQIT

SEQ ID NO: 10359 - protein, 5 aa, Artificial
  helical interface sequence
IDRIT

SEQ ID NO: 10360 - protein, 15 aa, Artificial
  helical interface sequence
KFNKEQQNAFYEILH

SEQ ID NO: 10361 - protein, 12 aa, Artificial
  helical interface sequence
LWHFRSLMFTRQ

SEQ ID NO: 10362 - protein, 19 aa, Artificial
  helical interface sequence
HQSLIEASNFIATIEERQG

SEQ ID NO: 10363 - protein, 9 aa, Artificial
  helical interface sequence
LVFDLVKAN

SEQ ID NO: 10364 - protein, 21 aa, Artificial
  helical interface sequence
SHILEKAVEYLNYNLKYSGVS

SEQ ID NO: 10365 - protein, 18 aa, Artificial
  helical interface sequence
AEVHASLDKFLCAVGTVL

SEQ ID NO: 10366 - protein, 18 aa, Artificial
  helical interface sequence
AEVHASLDKFLCAVGTVL

SEQ ID NO: 10367 - protein, 7 aa, Artificial
  helical interface sequence
VSENVIL

SEQ ID NO: 10368 - protein, 14 aa, Artificial
  helical interface sequence
WQMLEMLKPCVEDG

SEQ ID NO: 10369 - protein, 10 aa, Artificial
  helical interface sequence
AVPRAILELA

SEQ ID NO: 10370 - protein, 27 aa, Artificial
  helical interface sequence
DEVALQGIEFWSNVCDEEMDLAIEASE

SEQ ID NO: 10371 - protein, 29 aa, Artificial
  helical interface sequence
PEYWDRETQKYKRQAQADRVNLRKLRGYY

SEQ ID NO: 10372 - protein, 14 aa, Artificial
  helical interface sequence
AKNYGRAVYECLRG

SEQ ID NO: 10373 - protein, 10 aa, Artificial
  helical interface sequence
SVYAYGVMDR

SEQ ID NO: 10374 - protein, 15 aa, Artificial
  helical interface sequence
TGAIAAMLSTILYSR

SEQ ID NO: 10375 - protein, 7 aa, Artificial
  helical interface sequence
EAVFTDG

SEQ ID NO: 10376 - protein, 12 aa, Artificial
  helical interface sequence
IEKNLSDLIDLV

SEQ ID NO: 10377 - protein, 13 aa, Artificial
  helical interface sequence
FNEVFNDVRLLLN

SEQ ID NO: 10378 - protein, 12 aa, Artificial
  helical interface sequence
YQVEYALESISH

SEQ ID NO: 10379 - protein, 12 aa, Artificial
  helical interface sequence
QTFAYGVLDSNY

SEQ ID NO: 10380 - protein, 19 aa, Artificial
  helical interface sequence
PVNFKLLSHCLLVTLAARF

SEQ ID NO: 10381 - protein, 18 aa, Artificial
  helical interface sequence
AHAGEYGAEALERMFLSF

SEQ ID NO: 10382 - protein, 23 aa, Artificial
  helical interface sequence
PPVQAAYQKVVAGVANALAHKYH

SEQ ID NO: 10383 - protein, 11 aa, Artificial
  helical interface sequence
DSQKRREILSR

SEQ ID NO: 10384 - protein, 21 aa, Artificial
  helical interface sequence
PAAAIQQGKVESSKDFLIATL

SEQ ID NO: 10385 - protein, 28 aa, Artificial
  helical interface sequence
LSRLADNAWLRADRLNQLAFDTYQEFEE

SEQ ID NO: 10386 - protein, 12 aa, Artificial
  helical interface sequence
RYPLIIKNILEN

SEQ ID NO: 10387 - protein, 17 aa, Artificial
  helical interface sequence
SIPTICDLARTFAREMG

SEQ ID NO: 10388 - protein, 14 aa, Artificial
  helical interface sequence
RMHESMKLFDSICN

SEQ ID NO: 10389 - protein, 14 aa, Artificial
  helical interface sequence
STMRRIVRNLLKEL

SEQ ID NO: 10390 - protein, 7 aa, Artificial
  helical interface sequence
LLNAIAQ

SEQ ID NO: 10391 - protein, 20 aa, Artificial
  helical interface sequence
YLLPYILEAEAAAKEKDELD

SEQ ID NO: 10392 - protein, 35 aa, Artificial; identical to SEQ ID NO: 443
  helical interface sequence

SEQ ID NO: 10393 - protein, 13 aa, Artificial
  helical interface sequence
LDSYLLKPVQRIT

SEQ ID NO: 10394 - protein, 6 aa, Artificial
  helical interface sequence
TEEIMS

SEQ ID NO: 10395 - protein, 33 aa, Artificial
  helical interface sequence
PEYKNYFQYLKERITNQVQLLLTHQKFKLLYKQ

SEQ ID NO: 10396 - protein, 16 aa, Artificial
  helical interface sequence
RSMKSVLEHLRAKMQR

SEQ ID NO: 10397 - protein, 19 aa, Artificial
  helical interface sequence
PEEMYIQQKVRVLLMLRKM

SEQ ID NO: 10398 - protein, 27 aa, Artificial
  helical interface sequence
GIIDDTDQNYSQRIDNIRQQLADSQNK

SEQ ID NO: 10399 - protein, 6 aa, Artificial
  helical interface sequence
FIFQKM

SEQ ID NO: 10400 - protein, 12 aa, Artificial
  helical interface sequence
HHDMEVVLEKLK

SEQ ID NO: 10401 - protein, 15 aa, Artificial
  helical interface sequence
SDYNRTVMRNWTGKW

SEQ ID NO: 10402 - protein, 20 aa, Artificial
  helical interface sequence
VNYFLDGERQLGTRLMELRN

SEQ ID NO: 10403 - protein, 7 aa, Artificial
  helical interface sequence
PLVRLAF

SEQ ID NO: 10404 - protein, 13 aa, Artificial
  helical interface sequence
NSVWNQRHFVISN

SEQ ID NO: 10405 - protein, 13 aa, Artificial
  helical interface sequence
NSVWNQRHFVISN

SEQ ID NO: 10406 - protein, 20 aa, Artificial
  helical interface sequence
THDSSIRYLQEIYNSNNQKI

SEQ ID NO: 10407 - protein, 8 aa, Artificial
  helical interface sequence
PEEIRRTF

SEQ ID NO: 10408 - protein, 6 aa, Artificial
  helical interface sequence
KILEDN

SEQ ID NO: 10409 - protein, 32 aa, Artificial; identical to SEQ ID NO: 1080
  helical interface sequence

SEQ ID NO: 10410 - protein, 16 aa, Artificial
  helical interface sequence
LALPSVALCTLNSWLH

SEQ ID NO: 10411 - protein, 16 aa, Artificial
  helical interface sequence
FASAVRILEVVKDKAG

SEQ ID NO: 10412 - protein, 13 aa, Artificial
  helical interface sequence
SEEELSDLFRMFD

SEQ ID NO: 10413 - protein, 22 aa, Artificial
  helical interface sequence
VGDAQVLVRYMKAELELYRLQR

SEQ ID NO: 10414 - protein, 18 aa, Artificial
  helical interface sequence
WSMYSRLRKMLYLIYVAG

SEQ ID NO: 10415 - protein, 7 aa, Artificial
  helical interface sequence
RAMLLGK

SEQ ID NO: 10416 - protein, 23 aa, Artificial
  helical interface sequence
AGIAIELVRLFAVELEHYEKIEG

SEQ ID NO: 10417 - protein, 10 aa, Artificial
  helical interface sequence
ADLQALKKFI

SEQ ID NO: 10418 - protein, 11 aa, Artificial
  helical interface sequence
DDYVHEFCRYG

SEQ ID NO: 10419 - protein, 5 aa, Artificial
  helical interface sequence
EEFAK

SEQ ID NO: 10420 - protein, 16 aa, Artificial
  helical interface sequence
PHCRTMKNVLNHMTHC

SEQ ID NO: 10421 - protein, 6 aa, Artificial
  helical interface sequence
WTDGLT

SEQ ID NO: 10422 - protein, 6 aa, Artificial
  helical interface sequence
WTDGLT

SEQ ID NO: 10423 - protein, 12 aa, Artificial
  helical interface sequence
SVWIGGSILASL

SEQ ID NO: 10424 - protein, 7 aa, Artificial
  helical interface sequence
PTHRAAA

SEQ ID NO: 10425 - protein, 32 aa, Artificial
  helical interface sequence
TEELFKTLDKINFSYILSLEEVFRDFARDYSE

SEQ ID NO: 10426 - protein, 22 aa, Artificial
  helical interface sequence
AADTEAVTQLIGSNIELHSLYT

SEQ ID NO: 10427 - protein, 22 aa, Artificial
  helical interface sequence
IPDGRHLVNRGREEAASFKKLY

SEQ ID NO: 10428 - protein, 11 aa, Artificial
  helical interface sequence
QTFAYGVLDSN

SEQ ID NO: 10429 - protein, 19 aa, Artificial
  helical interface sequence
TEEGLDLLKLCVQELEKRM

SEQ ID NO: 10430 - protein, 5 aa, Artificial
  helical interface sequence
IMGVM

SEQ ID NO: 10431 - protein, 7 aa, Artificial
  helical interface sequence
LAYDVFG

SEQ ID NO: 10432 - protein, 26 aa, Artificial
  helical interface sequence
WDRSKQLIFLGSGLWIALVLVVGVLN

SEQ ID NO: 10433 - protein, 16 aa, Artificial
  helical interface sequence
QDLRSHLVHKLVQAIF

SEQ ID NO: 10434 - protein, 17 aa, Artificial
  helical interface sequence
PSRLKCVVEKFAVNHIN

SEQ ID NO: 10435 - protein, 6 aa, Artificial
  helical interface sequence
SEQLTS

SEQ ID NO: 10436 - protein, 24 aa, Artificial
  helical interface sequence
NFGSLLGICLILQILTGLFLAMHY

SEQ ID NO: 10437 - protein, 8 aa, Artificial
  helical interface sequence
PLHLAAYW

SEQ ID NO: 10438 - protein, 5 aa, Artificial
  helical interface sequence
LSQIT

SEQ ID NO: 10439 - protein, 5 aa, Artificial
  helical interface sequence
LSQIT

SEQ ID NO: 10440 - protein, 23 aa, Artificial
  helical interface sequence
MDELTEIKTVVSEAVTNAIIHGY

SEQ ID NO: 10441 - protein, 6 aa, Artificial
  helical interface sequence
RSVLSG

SEQ ID NO: 10442 - protein, 10 aa, Artificial
  helical interface sequence
PIVVACFDAI

SEQ ID NO: 10443 - protein, 5 aa, Artificial
  helical interface sequence
WSRLD

SEQ ID NO: 10444 - protein, 23 aa, Artificial
  helical interface sequence
IDSQIQYWQLIRWENAIFFAARE

SEQ ID NO: 10445 - protein, 19 aa, Artificial
  helical interface sequence
ELAKHAVSEGTKAVTKYTS

SEQ ID NO: 10446 - protein, 16 aa, Artificial
  helical interface sequence
LERSYQRFTAFYASRH

SEQ ID NO: 10447 - protein, 24 aa, Artificial
  helical interface sequence
SVLKFYTQQWEDYRFSSKVLNGIC

SEQ ID NO: 10448 - protein, 15 aa, Artificial
  helical interface sequence
KVRRAAAKCLDAVVS

SEQ ID NO: 10449 - protein, 12 aa, Artificial
  helical interface sequence
YEAVMNSVAKTG

SEQ ID NO: 10450 - protein, 13 aa, Artificial
  helical interface sequence
TEFEYLRKVLFEY

SEQ ID NO: 10451 - protein, 6 aa, Artificial
  helical interface sequence
SEQLTS

SEQ ID NO: 10452 - protein, 21 aa, Artificial
  helical interface sequence
NAPGAAANRVALEACTQARNE

SEQ ID NO: 10453 - protein, 32 aa, Artificial; identical to SEQ ID NO: 1080
  helical interface sequence

SEQ ID NO: 10454 - protein, 33 aa, Artificial; identical to SEQ ID NO: 7876
  helical interface sequence

SEQ ID NO: 10455 - protein, 20 aa, Artificial
  helical interface sequence
VFPVVIMGTFACIVALSVLD

SEQ ID NO: 10456 - protein, 25 aa, Artificial
  helical interface sequence
PNRVKWMIAFICLVMLAQLMLILKK

SEQ ID NO: 10457 - protein, 26 aa, Artificial
  helical interface sequence
EMLYAALLSFGLIFVGWGLGVLLLKI

SEQ ID NO: 10458 - protein, 25 aa, Artificial
  helical interface sequence
PNRVKWMIAFICLVMLAQLMLILKK

SEQ ID NO: 10459 - protein, 14 aa, Artificial
  helical interface sequence
PHLLWEVVRWQLAK

SEQ ID NO: 10460 - protein, 15 aa, Artificial
  helical interface sequence
KKQVLRMEHLVLKVL

SEQ ID NO: 10461 - protein, 16 aa, Artificial
  helical interface sequence
VNLSNSLVEIKNILKS

SEQ ID NO: 10462 - protein, 14 aa, Artificial
  helical interface sequence
LAMANSLRRVMIAE

SEQ ID NO: 10463 - protein, 17 aa, Artificial
  helical interface sequence
KAHYRRFLEFRDILEYE

SEQ ID NO: 10464 - protein, 18 aa, Artificial
  helical interface sequence
TKSFEDIHQYREQIKRVK

SEQ ID NO: 10465 - protein, 11 aa, Artificial
  helical interface sequence
EEEIREMLRRV

SEQ ID NO: 10466 - protein, 5 aa, Artificial
  helical interface sequence
AEDLI

SEQ ID NO: 10467 - protein, 16 aa, Artificial
  helical interface sequence
EKEFTDYLFNKSLEIE

SEQ ID NO: 10468 - protein, 15 aa, Artificial
  helical interface sequence
SLEKQKGVTNLLIKY

SEQ ID NO: 10469 - protein, 15 aa, Artificial
  helical interface sequence
SLEKQKGVTNLLIKY

SEQ ID NO: 10470 - protein, 5 aa, Artificial
  helical interface sequence
AFSLF

SEQ ID NO: 10471 - protein, 13 aa, Artificial
  helical interface sequence
SAEFIKNLSSIRR

SEQ ID NO: 10472 - protein, 12 aa, Artificial
  helical interface sequence
TASVNCAKKIVS

SEQ ID NO: 10473 - protein, 18 aa, Artificial
  helical interface sequence
ELEKALNSIIDVYHKYSL

SEQ ID NO: 10474 - protein, 9 aa, Artificial
  helical interface sequence
ALLRYLLDK

SEQ ID NO: 10475 - protein, 19 aa, Artificial
  helical interface sequence
PANFKILSHCILVLLAVKF

SEQ ID NO: 10476 - protein, 8 aa, Artificial
  helical interface sequence
ADEAKTLI

SEQ ID NO: 10477 - protein, 8 aa, Artificial
  helical interface sequence
RKKWIHCF

SEQ ID NO: 10478 - protein, 14 aa, Artificial
  helical interface sequence
GLGAEIAKNLILAG

SEQ ID NO: 10479 - protein, 24 aa, Artificial
  helical interface sequence
LESQEQRARAALRERYLRSLLAMV

SEQ ID NO: 10480 - protein, 23 aa, Artificial
  helical interface sequence
VADARVLVDFARISAQQEKVTYG

SEQ ID NO: 10481 - protein, 23 aa, Artificial
  helical interface sequence
VADARVLVDFARISAQQEKVTYG

SEQ ID NO: 10482 - protein, 8 aa, Artificial
  helical interface sequence
FFAENEQA

SEQ ID NO: 10483 - protein, 9 aa, Artificial
  helical interface sequence
EEKQQPLRE

SEQ ID NO: 10484 - protein, 10 aa, Artificial
  helical interface sequence
AEAYTIYCQN

SEQ ID NO: 10485 - protein, 28 aa, Artificial
  helical interface sequence
RSCRNSMRQQIQMEVGASLQYLAMGAHF

SEQ ID NO: 10486 - protein, 35 aa, Artificial; identical to SEQ ID NO: 5251
  helical interface sequence

SEQ ID NO: 10487 - protein, 28 aa, Artificial
  helical interface sequence
RSCRNSMRQQIQMEVGASLQYLAMGAHF

SEQ ID NO: 10488 - protein, 28 aa, Artificial
  helical interface sequence
RSCRNSMRQQIQMEVGASLQYLAMGAHF

SEQ ID NO: 10489 - protein, 23 aa, Artificial
  helical interface sequence
TADARSMIEHARTAAVTHNLYYD

SEQ ID NO: 10490 - protein, 7 aa, Artificial
  helical interface sequence
FGAHMAN

SEQ ID NO: 10491 - protein, 22 aa, Artificial
  helical interface sequence
AADTEAVTQLIGSNIELHSLYT

SEQ ID NO: 10492 - protein, 11 aa, Artificial
  helical interface sequence
AMDVVYALKRQ

SEQ ID NO: 10493 - protein, 12 aa, Artificial
  helical interface sequence
NAKLASLQQVLQ

SEQ ID NO: 10494 - protein, 12 aa, Artificial
  helical interface sequence
PKDIQLARRIRG

SEQ ID NO: 10495 - protein, 29 aa, Artificial
  helical interface sequence
SSAVMALQEASEAYLVALFEDTNLCAIHA

SEQ ID NO: 10496 - protein, 9 aa, Artificial
  helical interface sequence
RNNNDRMKV

SEQ ID NO: 10497 - protein, 7 aa, Artificial
  helical interface sequence
PWAREGA

SEQ ID NO: 10498 - protein, 11 aa, Artificial
  helical interface sequence
LDDQVILLRAG

SEQ ID NO: 10499 - protein, 23 aa, Artificial
  helical interface sequence
PVTNICQAADKQLFTLVEWAKRI

SEQ ID NO: 10500 - protein, 19 aa, Artificial
  helical interface sequence
KMSDVKCTSVVLLSVLQQL

SEQ ID NO: 10501 - protein, 5 aa, Artificial
  helical interface sequence
GKYRR

SEQ ID NO: 10502 - protein, 6 aa, Artificial
  helical interface sequence
KRALKN

SEQ ID NO: 10503 - protein, 21 aa, Artificial
  helical interface sequence
RTSLYLGLLLILVLALLFSSY

SEQ ID NO: 10504 - protein, 14 aa, Artificial
  helical interface sequence
LAMANSLRRVMIAE

SEQ ID NO: 10505 - protein, 12 aa, Artificial
  helical interface sequence
DEEVDEMIREAD

SEQ ID NO: 10506 - protein, 13 aa, Artificial
  helical interface sequence
RRNKLHYAFQLYD

SEQ ID NO: 10507 - protein, 16 aa, Artificial
  helical interface sequence
ISKAVDVYNSLKDRLG

SEQ ID NO: 10508 - protein, 11 aa, Artificial
  helical interface sequence
EDILRQAFRTF

SEQ ID NO: 10509 - protein, 11 aa, Artificial
  helical interface sequence
RDVQEICEYFA

SEQ ID NO: 10510 - protein, 6 aa, Artificial
  helical interface sequence
ANWYLN

SEQ ID NO: 10511 - protein, 15 aa, Artificial
  helical interface sequence
SLNRLLVKRQWAEAY

SEQ ID NO: 10512 - protein, 7 aa, Artificial
  helical interface sequence
EAILKRV

SEQ ID NO: 10513 - protein, 13 aa, Artificial
  helical interface sequence
PCRIELYRVVESL

SEQ ID NO: 10514 - protein, 7 aa, Artificial
  helical interface sequence
IVDECCF

SEQ ID NO: 10515 - protein, 12 aa, Artificial
  helical interface sequence
HMNDIKQLLWNG

SEQ ID NO: 10516 - protein, 26 aa, Artificial
  helical interface sequence
PNDLLYVFPVVIMGTFACIVALSVLD

SEQ ID NO: 10517 - protein, 27 aa, Artificial
  helical interface sequence
ILGAVFYIVFIALFFGIAVGIIFAIKS

SEQ ID NO: 10518 - protein, 10 aa, Artificial
  helical interface sequence
LWLAINLKQR

SEQ ID NO: 10519 - protein, 13 aa, Artificial
  helical interface sequence
EKAMELIRELHRA

SEQ ID NO: 10520 - protein, 13 aa, Artificial
  helical interface sequence
NTESYLKNVALKH

SEQ ID NO: 10521 - protein, 11 aa, Artificial
  helical interface sequence
SGTFLTQALNH

SEQ ID NO: 10522 - protein, 10 aa, Artificial
  helical interface sequence
PAARKLAREL

SEQ ID NO: 10523 - protein, 8 aa, Artificial
  helical interface sequence
YRQMSLLL

SEQ ID NO: 10524 - protein, 21 aa, Artificial
  helical interface sequence
DDHIQYFIYQTLRAVKVLHGS

SEQ ID NO: 10525 - protein, 12 aa, Artificial
  helical interface sequence
PQFQQMRQIIQQ

SEQ ID NO: 10526 - protein, 29 aa, Artificial
  helical interface sequence
SKDKEVIETLSEIYSIVITLDHVEKAYLK

SEQ ID NO: 10527 - protein, 11 aa, Artificial
  helical interface sequence
AIYVYKVLKQV

SEQ ID NO: 10528 - protein, 16 aa, Artificial
  helical interface sequence
PEQLQAWRWEREIDER

SEQ ID NO: 10529 - protein, 17 aa, Artificial
  helical interface sequence
PEGYRKALRLMKQAEKF

SEQ ID NO: 10530 - protein, 8 aa, Artificial
  helical interface sequence
IMGVMSLG

SEQ ID NO: 10531 - protein, 8 aa, Artificial
  helical interface sequence
SMVVLQQR

SEQ ID NO: 10532 - protein, 11 aa, Artificial
  helical interface sequence
PTEVMGVASFY

SEQ ID NO: 10533 - protein, 10 aa, Artificial
  helical interface sequence
VIYHFKHYTE

SEQ ID NO: 10534 - protein, 5 aa, Artificial
  helical interface sequence
PDFIY

SEQ ID NO: 10535 - protein, 15 aa, Artificial
  helical interface sequence
ILTILTEVNYEVSNK

SEQ ID NO: 10536 - protein, 29 aa, Artificial
  helical interface sequence
GFMLRYLHANGASLFFIAVYLHIFRGLYY

SEQ ID NO: 10537 - protein, 7 aa, Artificial
  helical interface sequence
LERFETG

SEQ ID NO: 10538 - protein, 6 aa, Artificial
  helical interface sequence
SEQLTS

SEQ ID NO: 10539 - protein, 7 aa, Artificial
  helical interface sequence
SEQLTSG

SEQ ID NO: 10540 - protein, 15 aa, Artificial
  helical interface sequence
EEDHRIVQKQWDILW

SEQ ID NO: 10541 - protein, 16 aa, Artificial
  helical interface sequence
VLEGLKVKSEWGRAYG

SEQ ID NO: 10542 - protein, 15 aa, Artificial
  helical interface sequence
KKTIRQLKARISNLE

SEQ ID NO: 10543 - protein, 21 aa, Artificial
  helical interface sequence
DEAQKVIYTLMEKDSYPRFLK

SEQ ID NO: 10544 - protein, 21 aa, Artificial
  helical interface sequence
DEAQKVIYTLMEKDSYPRFLK

SEQ ID NO: 10545 - protein, 8 aa, Artificial
  helical interface sequence
SKEALQIL

SEQ ID NO: 10546 - protein, 15 aa, Artificial
  helical interface sequence
LSKQAVAYRQLSLLL

SEQ ID NO: 10547 - protein, 10 aa, Artificial
  helical interface sequence
AHLPPLCEEK

SEQ ID NO: 10548 - protein, 12 aa, Artificial
  helical interface sequence
YKGVKLAKFGKE

SEQ ID NO: 10549 - protein, 14 aa, Artificial
  helical interface sequence
KRKVDWLTEKMREA

SEQ ID NO: 10550 - protein, 9 aa, Artificial
  helical interface sequence
VSSLMNGLG

SEQ ID NO: 10551 - protein, 12 aa, Artificial
  helical interface sequence
EDTFKQIYAQFF

SEQ ID NO: 10552 - protein, 9 aa, Artificial
  helical interface sequence
PEEAAEELY

SEQ ID NO: 10553 - protein, 8 aa, Artificial
  helical interface sequence
EASLKKVL

SEQ ID NO: 10554 - protein, 5 aa, Artificial
  helical interface sequence
FNLIY

SEQ ID NO: 10555 - protein, 9 aa, Artificial
  helical interface sequence
RPDAEYWNS

SEQ ID NO: 10556 - protein, 22 aa, Artificial
  helical interface sequence
AQGALANIAVDKANLEIMTKRS

SEQ ID NO: 10557 - protein, 8 aa, Artificial
  helical interface sequence
SSMKLYLK

SEQ ID NO: 10558 - protein, 12 aa, Artificial
  helical interface sequence
DIRILRDIEQYY

SEQ ID NO: 10559 - protein, 26 aa, Artificial
  helical interface sequence
DEDVNKQLDRMGYNIGVRLIEDFLAR

SEQ ID NO: 10560 - protein, 11 aa, Artificial
  helical interface sequence
KTTILYKLKLG

SEQ ID NO: 10561 - protein, 10 aa, Artificial
  helical interface sequence
KTTILYKLKL

SEQ ID NO: 10562 - protein, 11 aa, Artificial
  helical interface sequence
TLNLRYTRVAL

SEQ ID NO: 10563 - protein, 17 aa, Artificial
  helical interface sequence
GKTHREFPDAFYDISRD

SEQ ID NO: 10564 - protein, 31 aa, Artificial
  helical interface sequence
DQRVEQEAKRRFEKYGQLFMEETLKAAKRMR

SEQ ID NO: 10565 - protein, 7 aa, Artificial
  helical interface sequence
GDFANGA

SEQ ID NO: 10566 - protein, 26 aa, Artificial
  helical interface sequence
MEGIHRWAIWMAVLVTLTGGIGILLS

SEQ ID NO: 10567 - protein, 19 aa, Artificial
  helical interface sequence
ILKARQERRLAEINREFLC

SEQ ID NO: 10568 - protein, 11 aa, Artificial
  helical interface sequence
EEIERQLKALG

SEQ ID NO: 10569 - protein, 18 aa, Artificial
  helical interface sequence
SKCVYTYIQELYRSLVQK

SEQ ID NO: 10570 - protein, 6 aa, Artificial
  helical interface sequence
HDLRHL

SEQ ID NO: 10571 - protein, 16 aa, Artificial
  helical interface sequence
PMVRRAAASKLGEFAK

SEQ ID NO: 10572 - protein, 8 aa, Artificial
  helical interface sequence
FYDECLRK

SEQ ID NO: 10573 - protein, 11 aa, Artificial
  helical interface sequence
STTMRRLIDTY

SEQ ID NO: 10574 - protein, 7 aa, Artificial
  helical interface sequence
DTFYRQF

SEQ ID NO: 10575 - protein, 5 aa, Artificial
  helical interface sequence
WRVRY

SEQ ID NO: 10576 - protein, 10 aa, Artificial
  helical interface sequence
PRHLQLAVRN

SEQ ID NO: 10577 - protein, 12 aa, Artificial
  helical interface sequence
AIYVYKVLKQVH

SEQ ID NO: 10578 - protein, 19 aa, Artificial
  helical interface sequence
ELAKHAVSEGTKAVTKYTS

SEQ ID NO: 10579 - protein, 11 aa, Artificial
  helical interface sequence
FKNLKRVAKEL

SEQ ID NO: 10580 - protein, 14 aa, Artificial
  helical interface sequence
LKNVFDEAILAALE

SEQ ID NO: 10581 - protein, 11 aa, Artificial
  helical interface sequence
AAEYYRAYLEG

SEQ ID NO: 10582 - protein, 11 aa, Artificial
  helical interface sequence
FEEVKRALEIA

SEQ ID NO: 10583 - protein, 10 aa, Artificial
  helical interface sequence
KELALYVLSF

SEQ ID NO: 10584 - protein, 13 aa, Artificial
  helical interface sequence
AYQSFEQVVNELF

SEQ ID NO: 10585 - protein, 16 aa, Artificial
  helical interface sequence
KNLLDLTCQTVADMIK

SEQ ID NO: 10586 - protein, 7 aa, Artificial
  helical interface sequence
KSWYEIE

SEQ ID NO: 10587 - protein, 30 aa, Artificial; identical to SEQ ID NO: 664
  helical interface sequence

SEQ ID NO: 10588 - protein, 11 aa, Artificial
  helical interface sequence
RHQLELYVTKF

SEQ ID NO: 10589 - protein, 15 aa, Artificial
  helical interface sequence
VADMLVKVNALIKDR

SEQ ID NO: 10590 - protein, 13 aa, Artificial
  helical interface sequence
QVEKEMLQVGEKR

SEQ ID NO: 10591 - protein, 12 aa, Artificial
  helical interface sequence
TVKHLLDAAARG

SEQ ID NO: 10592 - protein, 7 aa, Artificial
  helical interface sequence
EAEISHT

SEQ ID NO: 10593 - protein, 13 aa, Artificial
  helical interface sequence
AYQSFEQVVNELF

SEQ ID NO: 10594 - protein, 16 aa, Artificial
  helical interface sequence
GTFLTQALNHMYKLRT

SEQ ID NO: 10595 - protein, 11 aa, Artificial
  helical interface sequence
TREGNDLYHEM

SEQ ID NO: 10596 - protein, 19 aa, Artificial
  helical interface sequence
IPMAEKKLAQIGDEINEKW

SEQ ID NO: 10597 - protein, 11 aa, Artificial
  helical interface sequence
FASVEHIMRNV

SEQ ID NO: 10598 - protein, 29 aa, Artificial
  helical interface sequence
GFMLRYLHANGASLFFIAVYLHIFRGLYY

SEQ ID NO: 10599 - protein, 11 aa, Artificial
  helical interface sequence
IGHSIQTWLLG

SEQ ID NO: 10600 - protein, 29 aa, Artificial
  helical interface sequence
RRDFLYYATAGAGAVATGAAVWPLINQMN

SEQ ID NO: 10601 - protein, 19 aa, Artificial
  helical interface sequence
KIETLRLAKNYIWALSEIL

SEQ ID NO: 10602 - protein, 12 aa, Artificial
  helical interface sequence
PQIHRANMLAQG

SEQ ID NO: 10603 - protein, 8 aa, Artificial
  helical interface sequence
VGEALMRR

SEQ ID NO: 10604 - protein, 13 aa, Artificial
  helical interface sequence
PFAAQVAAERCAD

SEQ ID NO: 10605 - protein, 13 aa, Artificial
  helical interface sequence
PLNAFDGALLNAG

SEQ ID NO: 10606 - protein, 11 aa, Artificial
  helical interface sequence
YEALYATIQGH

SEQ ID NO: 10607 - protein, 7 aa, Artificial
  helical interface sequence
FGLKLAG

SEQ ID NO: 10608 - protein, 10 aa, Artificial
  helical interface sequence
IQQIYEWHRD

SEQ ID NO: 10609 - protein, 5 aa, Artificial
  helical interface sequence
KHWLR

SEQ ID NO: 10610 - protein, 19 aa, Artificial
  helical interface sequence
PENFKLLGNVLVVVLARHH

SEQ ID NO: 10611 - protein, 13 aa, Artificial
  helical interface sequence
VAQIDALSQMVAE

SEQ ID NO: 10612 - protein, 12 aa, Artificial
  helical interface sequence
AFTKVAAQADTR

SEQ ID NO: 10613 - protein, 13 aa, Artificial
  helical interface sequence
VAQIDALSQMVAE

SEQ ID NO: 10614 - protein, 16 aa, Artificial
  helical interface sequence
PHVFIYCAFIEYYATG

SEQ ID NO: 10615 - protein, 7 aa, Artificial
  helical interface sequence
DGSVGYS

SEQ ID NO: 10616 - protein, 17 aa, Artificial
  helical interface sequence
TEHIPRLVMQAIRAALS

SEQ ID NO: 10617 - protein, 10 aa, Artificial
  helical interface sequence
IPQSRELIAQ

SEQ ID NO: 10618 - protein, 10 aa, Artificial
  helical interface sequence
VFYLHSRLLE

SEQ ID NO: 10619 - protein, 5 aa, Artificial
  helical interface sequence
DGRLA

SEQ ID NO: 10620 - protein, 21 aa, Artificial
  helical interface sequence
FSNRVYEALYYVHSLLYSSMT

SEQ ID NO: 10621 - protein, 9 aa, Artificial
  helical interface sequence
DLDALLADL

SEQ ID NO: 10622 - protein, 15 aa, Artificial
  helical interface sequence
LKSTLRVLYNLFTKY

SEQ ID NO: 10623 - protein, 20 aa, Artificial
  helical interface sequence
HFDRIVDEVQGFFEVHRALG

SEQ ID NO: 10624 - protein, 7 aa, Artificial
  helical interface sequence
RPLWRHY

SEQ ID NO: 10625 - protein, 6 aa, Artificial
  helical interface sequence
LLSDVI

SEQ ID NO: 10626 - protein, 16 aa, Artificial
  helical interface sequence
PHLLWEVVRWQLAKRR

SEQ ID NO: 10627 - protein, 23 aa, Artificial
  helical interface sequence
RKARETLFAAGNYAYAHRKRRKR

SEQ ID NO: 10628 - protein, 21 aa, Artificial
  helical interface sequence
LEKRQGALELIKKGYTQQLAF

SEQ ID NO: 10629 - protein, 5 aa, Artificial
  helical interface sequence
SLASV

SEQ ID NO: 10630 - protein, 12 aa, Artificial
  helical interface sequence
YLYDMIIQAYNA

SEQ ID NO: 10631 - protein, 22 aa, Artificial
  helical interface sequence
AADTEAVTQLIGSNIELHSLYT

SEQ ID NO: 10632 - protein, 11 aa, Artificial
  helical interface sequence
KEEWRSLVLRH

SEQ ID NO: 10633 - protein, 10 aa, Artificial
  helical interface sequence
PQLLVQAYQQ

SEQ ID NO: 10634 - protein, 12 aa, Artificial
  helical interface sequence
YEQYLSMVFSIV

SEQ ID NO: 10635 - protein, 11 aa, Artificial
  helical interface sequence
SWIQNEFNKAC

SEQ ID NO: 10636 - protein, 31 aa, Artificial; identical to SEQ ID NO: 4387
  helical interface sequence

SEQ ID NO: 10637 - protein, 12 aa, Artificial
  helical interface sequence
IVAAHGYFGRLI

SEQ ID NO: 10638 - protein, 6 aa, Artificial
  helical interface sequence
WELSYR

SEQ ID NO: 10639 - protein, 10 aa, Artificial
  helical interface sequence
CIIALFFFAI

SEQ ID NO: 10640 - protein, 8 aa, Artificial
  helical interface sequence
LLVVEYYS

SEQ ID NO: 10641 - protein, 16 aa, Artificial
  helical interface sequence
LLDRIISHIDQFFIRH

SEQ ID NO: 10642 - protein, 19 aa, Artificial
  helical interface sequence
LENFLERLKTIMREKYSKC

SEQ ID NO: 10643 - protein, 28 aa, Artificial
  helical interface sequence
TILFQLALAALVILSFVMVIGVPVAYAS

SEQ ID NO: 10644 - protein, 13 aa, Artificial
  helical interface sequence
TVALREIRRYQKS

SEQ ID NO: 10645 - protein, 12 aa, Artificial
  helical interface sequence
AIYVYKVLKQVH

SEQ ID NO: 10646 - protein, 12 aa, Artificial
  helical interface sequence
SREIQTAVRLLL

SEQ ID NO: 10647 - protein, 5 aa, Artificial
  helical interface sequence
EEFGR

SEQ ID NO: 10648 - protein, 16 aa, Artificial
  helical interface sequence
KTALTLAVTTTLKELT

SEQ ID NO: 10649 - protein, 22 aa, Artificial
  helical interface sequence
TVEERVINEEYKIWKKNTPFLY

SEQ ID NO: 10650 - protein, 16 aa, Artificial
  helical interface sequence
TELVNKISENCFEKCL

SEQ ID NO: 10651 - protein, 16 aa, Artificial
  helical interface sequence
TELVNKISENCFEKCL

SEQ ID NO: 10652 - protein, 10 aa, Artificial
  helical interface sequence
DPILPGLFDG

SEQ ID NO: 10653 - protein, 29 aa, Artificial
  helical interface sequence
GWLIRNLHANGASFFFICIFLHIGRGLYY

SEQ ID NO: 10654 - protein, 7 aa, Artificial
  helical interface sequence
SLYKTFF

SEQ ID NO: 10655 - protein, 15 aa, Artificial
  helical interface sequence
PRGETIERVLREEKG

SEQ ID NO: 10656 - protein, 13 aa, Artificial
  helical interface sequence
KAEVAAEFLNDRV

SEQ ID NO: 10657 - protein, 21 aa, Artificial
  helical interface sequence
ASTNAVIAAVCATEVFKIATS

SEQ ID NO: 10658 - protein, 17 aa, Artificial
  helical interface sequence
QAGDLGGEALERLFITY

SEQ ID NO: 10659 - protein, 9 aa, Artificial
  helical interface sequence
MRDNWRSEL

SEQ ID NO: 10660 - protein, 22 aa, Artificial
  helical interface sequence
EEENEGIVQLRILRTQEAIIQI

SEQ ID NO: 10661 - protein, 5 aa, Artificial
  helical interface sequence
IRYRT

SEQ ID NO: 10662 - protein, 24 aa, Artificial
  helical interface sequence
KHKLVDFIIEFMEEVDAEISEMKL

SEQ ID NO: 10663 - protein, 9 aa, Artificial
  helical interface sequence
VLLNWHEKV

SEQ ID NO: 10664 - protein, 9 aa, Artificial
  helical interface sequence
EGEQCSAAH

SEQ ID NO: 10665 - protein, 25 aa, Artificial
  helical interface sequence
LEDAQSLQELQSNILTVLAAVIRKS

SEQ ID NO: 10666 - protein, 15 aa, Artificial
  helical interface sequence
TDVDAANLRETFRNL

SEQ ID NO: 10667 - protein, 20 aa, Artificial
  helical interface sequence
DDEIYQLACRDEQEQIELIR

SEQ ID NO: 10668 - protein, 7 aa, Artificial
  helical interface sequence
KQVKSVA

SEQ ID NO: 10669 - protein, 9 aa, Artificial
  helical interface sequence
RPILQGFRT

SEQ ID NO: 10670 - protein, 10 aa, Artificial
  helical interface sequence
LLAYLRRKLG

SEQ ID NO: 10671 - protein, 14 aa, Artificial
  helical interface sequence
KRKVDWLTEKMREA

SEQ ID NO: 10672 - protein, 6 aa, Artificial
  helical interface sequence
DEQLKS

SEQ ID NO: 10673 - protein, 19 aa, Artificial
  helical interface sequence
KQYRHLLLEDQRIRGLLEK

SEQ ID NO: 10674 - protein, 11 aa, Artificial
  helical interface sequence
VNLYQNYSELI

SEQ ID NO: 10675 - protein, 15 aa, Artificial
  helical interface sequence
TREGNDLYREMKETG

SEQ ID NO: 10676 - protein, 22 aa, Artificial
  helical interface sequence
GFLDVWTYNAELLVLMENERTL

SEQ ID NO: 10677 - protein, 11 aa, Artificial
  helical interface sequence
HQDQSIRIQRM

SEQ ID NO: 10678 - protein, 9 aa, Artificial
  helical interface sequence
ENEFIAICT

SEQ ID NO: 10679 - protein, 16 aa, Artificial
  helical interface sequence
NYELISNELKARLLQE

SEQ ID NO: 10680 - protein, 8 aa, Artificial
  helical interface sequence
VAWRNRCK

SEQ ID NO: 10681 - protein, 28 aa, Artificial
  helical interface sequence
QQWFQQEQTTYISRTVNRTLDDYCRSNN

SEQ ID NO: 10682 - protein, 5 aa, Artificial
  helical interface sequence
EYDIV

SEQ ID NO: 10683 - protein, 20 aa, Artificial
  helical interface sequence
MYLLKDLWQKRQKQVKDNEN

SEQ ID NO: 10684 - protein, 10 aa, Artificial
  helical interface sequence
QAKLIEFLSK

SEQ ID NO: 10685 - protein, 9 aa, Artificial
  helical interface sequence
HTLGNLIRA

SEQ ID NO: 10686 - protein, 8 aa, Artificial
  helical interface sequence
PIEMYLSD

SEQ ID NO: 10687 - protein, 6 aa, Artificial
  helical interface sequence
PIEMYL

SEQ ID NO: 10688 - protein, 20 aa, Artificial
  helical interface sequence
DIIAAAKRMALLMAEMSRLV

SEQ ID NO: 10689 - protein, 9 aa, Artificial
  helical interface sequence
FLVQRTVAR

SEQ ID NO: 10690 - protein, 41 aa, Artificial; identical to SEQ ID NO: 1069
  helical interface sequence

SEQ ID NO: 10691 - protein, 10 aa, Artificial
  helical interface sequence
KEVFAQFRAN

SEQ ID NO: 10692 - protein, 31 aa, Artificial; identical to SEQ ID NO: 2073
  helical interface sequence

SEQ ID NO: 10693 - protein, 6 aa, Artificial
  helical interface sequence
LLTDVI

SEQ ID NO: 10694 - protein, 7 aa, Artificial
  helical interface sequence
SDLYKLK

SEQ ID NO: 10695 - protein, 12 aa, Artificial
  helical interface sequence
VGFIAKIKKVCE

SEQ ID NO: 10696 - protein, 11 aa, Artificial
  helical interface sequence
ESTQLLMKYLG

SEQ ID NO: 10697 - protein, 21 aa, Artificial
  helical interface sequence
NAPGAVANRVALEACVKARNE

SEQ ID NO: 10698 - protein, 6 aa, Artificial
  helical interface sequence
TDLIYY

SEQ ID NO: 10699 - protein, 6 aa, Artificial
  helical interface sequence
KDCLIG

SEQ ID NO: 10700 - protein, 12 aa, Artificial
  helical interface sequence
PKDIQLARRIRG

SEQ ID NO: 10701 - protein, 34 aa, Artificial; identical to SEQ ID NO: 334
  helical interface sequence

SEQ ID NO: 10702 - protein, 10 aa, Artificial
  helical interface sequence
YNLNQFAMSL

SEQ ID NO: 10703 - protein, 10 aa, Artificial
  helical interface sequence
LLVQRTIART

SEQ ID NO: 10704 - protein, 12 aa, Artificial
  helical interface sequence
SDLQSLKSFIND

SEQ ID NO: 10705 - protein, 35 aa, Artificial; identical to SEQ ID NO: 5344
  helical interface sequence

SEQ ID NO: 10706 - protein, 14 aa, Artificial
  helical interface sequence
PQAHVIENLHAAAY

SEQ ID NO: 10707 - protein, 13 aa, Artificial
  helical interface sequence
YWAASAIKEAKKY

SEQ ID NO: 10708 - protein, 22 aa, Artificial
  helical interface sequence
IQAGATANRVALEAMVLARNEG

SEQ ID NO: 10709 - protein, 21 aa, Artificial
  helical interface sequence
RWFLVQIEELVRLEEKVAEVG

SEQ ID NO: 10710 - protein, 9 aa, Artificial
  helical interface sequence
YEEFVQMMT

SEQ ID NO: 10711 - protein, 11 aa, Artificial
  helical interface sequence
LFQMEMAKRST

SEQ ID NO: 10712 - protein, 10 aa, Artificial
  helical interface sequence
QWWKLYSKVK

SEQ ID NO: 10713 - protein, 11 aa, Artificial
  helical interface sequence
DEDVDEIIKLT

SEQ ID NO: 10714 - protein, 9 aa, Artificial
  helical interface sequence
KNFLEASYD

SEQ ID NO: 10715 - protein, 9 aa, Artificial
  helical interface sequence
PHMFPKMLM

SEQ ID NO: 10716 - protein, 24 aa, Artificial
  helical interface sequence
AYVEELTWDLARKAWGHIQEVEKV

SEQ ID NO: 10717 - protein, 9 aa, Artificial
  helical interface sequence
IKELREMIQ

SEQ ID NO: 10718 - protein, 12 aa, Artificial
  helical interface sequence
PYIRARMYMWRY

SEQ ID NO: 10719 - protein, 12 aa, Artificial
  helical interface sequence
PYIRARMYMWRY

SEQ ID NO: 10720 - protein, 11 aa, Artificial
  helical interface sequence
YAERLRAYLEG

SEQ ID NO: 10721 - protein, 8 aa, Artificial
  helical interface sequence
KYKTLRQI

SEQ ID NO: 10722 - protein, 18 aa, Artificial
  helical interface sequence
KRTTAWYAIRHVRDINQN

SEQ ID NO: 10723 - protein, 10 aa, Artificial
  helical interface sequence
KYLSQQWAKA

SEQ ID NO: 10724 - protein, 11 aa, Artificial
  helical interface sequence
PRHLQLAIRGD

SEQ ID NO: 10725 - protein, 8 aa, Artificial
  helical interface sequence
PGADFVLH

SEQ ID NO: 10726 - protein, 8 aa, Artificial
  helical interface sequence
RVENISTT

SEQ ID NO: 10727 - protein, 19 aa, Artificial
  helical interface sequence
PAVHASLDKFFTAVSTVLT

SEQ ID NO: 10728 - protein, 23 aa, Artificial
  helical interface sequence
LNDQVTLLKYGVHEIIYTMLASL

SEQ ID NO: 10729 - protein, 14 aa, Artificial
  helical interface sequence
YQVEYAFKATNQTN

SEQ ID NO: 10730 - protein, 14 aa, Artificial
  helical interface sequence
YQVEYAFKATNQTN

SEQ ID NO: 10731 - protein, 16 aa, Artificial
  helical interface sequence
KGLLDVTCKTVANMIK

SEQ ID NO: 10732 - protein, 19 aa, Artificial
  helical interface sequence
PAVHASLDKFLANVSTVLT

SEQ ID NO: 10733 - protein, 10 aa, Artificial
  helical interface sequence
LNVQRKAIHE

SEQ ID NO: 10734 - protein, 12 aa, Artificial
  helical interface sequence
FQVEYALEAIKQ

SEQ ID NO: 10735 - protein, 18 aa, Artificial
  helical interface sequence
PSYIFEYLATVMYQRRSK

SEQ ID NO: 10736 - protein, 12 aa, Artificial
  helical interface sequence
FQVEYSLEAIKL

SEQ ID NO: 10737 - protein, 8 aa, Artificial
  helical interface sequence
LWHLRSLV

SEQ ID NO: 10738 - protein, 17 aa, Artificial
  helical interface sequence
FQKTGSACLLVASKLRS

SEQ ID NO: 10739 - protein, 16 aa, Artificial
  helical interface sequence
ASTIVSNAARSLFAEQ

SEQ ID NO: 10740 - protein, 5 aa, Artificial
  helical interface sequence
SEQLT

SEQ ID NO: 10741 - protein, 18 aa, Artificial
  helical interface sequence
QDEVAASAILTAQLDEEL

SEQ ID NO: 10742 - protein, 5 aa, Artificial
  helical interface sequence
PKELN

SEQ ID NO: 10743 - protein, 7 aa, Artificial
  helical interface sequence
LRRLEMY

SEQ ID NO: 10744 - protein, 11 aa, Artificial
  helical interface sequence
EEQIYELFSKS

SEQ ID NO: 10745 - protein, 19 aa, Artificial
  helical interface sequence
EDEVSRAKNQLKSSLLMNL

SEQ ID NO: 10746 - protein, 19 aa, Artificial
  helical interface sequence
PVNFKFLGHCFLVVVAIHH

SEQ ID NO: 10747 - protein, 11 aa, Artificial
  helical interface sequence
YSQCGDVMRAL

SEQ ID NO: 10748 - protein, 21 aa, Artificial
  helical interface sequence
AESKVFYLKMKGDYYRYLAEV

SEQ ID NO: 10749 - protein, 5 aa, Artificial
  helical interface sequence
ESFLF

SEQ ID NO: 10750 - protein, 15 aa, Artificial
  helical interface sequence
AKNYGRAVYECLRGG

SEQ ID NO: 10751 - protein, 14 aa, Artificial
  helical interface sequence
AKNYGRAVYECLRG

SEQ ID NO: 10752 - protein, 5 aa, Artificial
  helical interface sequence
NWFKE

SEQ ID NO: 10753 - protein, 22 aa, Artificial
  helical interface sequence
AGDTVQFAEYIQKNVQLYKMRN

SEQ ID NO: 10754 - protein, 19 aa, Artificial
  helical interface sequence
VEQAYDLARRAIYQATYRD

SEQ ID NO: 10755 - protein, 10 aa, Artificial
  helical interface sequence
EMEVWALEAY

SEQ ID NO: 10756 - protein, 15 aa, Artificial
  helical interface sequence
GKNYGRVVYEALKGG

SEQ ID NO: 10757 - protein, 12 aa, Artificial
  helical interface sequence
EEELSDLFRMFD

SEQ ID NO: 10758 - protein, 6 aa, Artificial
  helical interface sequence
ADAMMQ

SEQ ID NO: 10759 - protein, 12 aa, Artificial
  helical interface sequence
INGWLRDFLWAQ

SEQ ID NO: 10760 - protein, 21 aa, Artificial
  helical interface sequence
NADSRILIEKARVEAQSHRLT

SEQ ID NO: 10761 - protein, 15 aa, Artificial
  helical interface sequence
ETWLGSQCRLHELRE

SEQ ID NO: 10762 - protein, 15 aa, Artificial
  helical interface sequence
VERAGHLLCDKAQKN

SEQ ID NO: 10763 - protein, 29 aa, Artificial
  helical interface sequence
YISEVKEVLQECKTVALKRRKASSRLENL

SEQ ID NO: 10764 - protein, 15 aa, Artificial
  helical interface sequence
QIAELMWHRMQEWRN

SEQ ID NO: 10765 - protein, 9 aa, Artificial
  helical interface sequence
PVQQAMIDH

SEQ ID NO: 10766 - protein, 6 aa, Artificial
  helical interface sequence
ARAHVT

SEQ ID NO: 10767 - protein, 11 aa, Artificial
  helical interface sequence
PFICELAKAYV

SEQ ID NO: 10768 - protein, 10 aa, Artificial
  helical interface sequence
KKERMAQLNS

SEQ ID NO: 10769 - protein, 14 aa, Artificial
  helical interface sequence
IAAKLAKDREAAEG

SEQ ID NO: 10770 - protein, 10 aa, Artificial
  helical interface sequence
PAQMAKYHQF

SEQ ID NO: 10771 - protein, 11 aa, Artificial
  helical interface sequence
ELGRPDAEYWN

SEQ ID NO: 10772 - protein, 8 aa, Artificial
  helical interface sequence
RRWAKKHH

SEQ ID NO: 10773 - protein, 5 aa, Artificial
  helical interface sequence
RSDIF

SEQ ID NO: 10774 - protein, 12 aa, Artificial
  helical interface sequence
PKDIQLARRIRG

SEQ ID NO: 10775 - protein, 10 aa, Artificial
  helical interface sequence
GNDIVSWLWG

SEQ ID NO: 10776 - protein, 31 aa, Artificial; identical to SEQ ID NO: 4717
  helical interface sequence

SEQ ID NO: 10777 - protein, 10 aa, Artificial
  helical interface sequence
HSVIGFIQRM

SEQ ID NO: 10778 - protein, 15 aa, Artificial
  helical interface sequence
IFSHLDWTNNFSLVH

SEQ ID NO: 10779 - protein, 7 aa, Artificial
  helical interface sequence
ELEQIAD

SEQ ID NO: 10780 - protein, 7 aa, Artificial
  helical interface sequence
PAVFLRD

SEQ ID NO: 10781 - protein, 27 aa, Artificial
  helical interface sequence
PFHGLSIAFLYGSALLFAMHGATILAV

SEQ ID NO: 10782 - protein, 7 aa, Artificial
  helical interface sequence
ELEQIAD

SEQ ID NO: 10783 - protein, 7 aa, Artificial
  helical interface sequence
LRPLSYP

SEQ ID NO: 10784 - protein, 13 aa, Artificial
  helical interface sequence
LDSYLLKPVQRIT

SEQ ID NO: 10785 - protein, 5 aa, Artificial
  helical interface sequence
TEQLA

SEQ ID NO: 10786 - protein, 5 aa, Artificial
  helical interface sequence
LKEFV

SEQ ID NO: 10787 - protein, 6 aa, Artificial
  helical interface sequence
PLSAHR

SEQ ID NO: 10788 - protein, 31 aa, Artificial
  helical interface sequence
AQIQELSEMWRVNQQFVTRLQQQLVDIRQTC

SEQ ID NO: 10789 - protein, 12 aa, Artificial
  helical interface sequence
LLEIEGLLQQAT

SEQ ID NO: 10790 - protein, 16 aa, Artificial
  helical interface sequence
QGCVAYFRSYFNRHFR

SEQ ID NO: 10791 - protein, 8 aa, Artificial
  helical interface sequence
LVDALVKL

SEQ ID NO: 10792 - protein, 5 aa, Artificial
  helical interface sequence
SEQLT

SEQ ID NO: 10793 - protein, 12 aa, Artificial
  helical interface sequence
SVWIGGSILASL

SEQ ID NO: 10794 - protein, 12 aa, Artificial
  helical interface sequence
SVWIGGSILASL

SEQ ID NO: 10795 - protein, 14 aa, Artificial
  helical interface sequence
YSWIINGIEWAISN

SEQ ID NO: 10796 - protein, 21 aa, Artificial
  helical interface sequence
QAQETQGQAAARAAAADLAAG

SEQ ID NO: 10797 - protein, 11 aa, Artificial
  helical interface sequence
IPPILRLAETL

SEQ ID NO: 10798 - protein, 13 aa, Artificial
  helical interface sequence
PLNAFDGALLNAG

SEQ ID NO: 10799 - protein, 13 aa, Artificial
  helical interface sequence
PLNAFDGALLNAG

SEQ ID NO: 10800 - protein, 13 aa, Artificial
  helical interface sequence
PLNAFDGALLNAG

SEQ ID NO: 10801 - protein, 33 aa, Artificial; identical to SEQ ID NO: 3616
  helical interface sequence

SEQ ID NO: 10802 - protein, 13 aa, Artificial
  helical interface sequence
SEEEIREAFRVFD

SEQ ID NO: 10803 - protein, 10 aa, Artificial
  helical interface sequence
ESAWNYLKGI

SEQ ID NO: 10804 - protein, 15 aa, Artificial
  helical interface sequence
YQVWHHRRVLVEWLK

SEQ ID NO: 10805 - protein, 8 aa, Artificial
  helical interface sequence
PEEIRRTF

SEQ ID NO: 10806 - protein, 5 aa, Artificial
  helical interface sequence
EELNA

SEQ ID NO: 10807 - protein, 23 aa, Artificial
  helical interface sequence
MSSAKAALESDTRVLAYHLGRNY

SEQ ID NO: 10808 - protein, 16 aa, Artificial
  helical interface sequence
VAHLIECLLSKVAALS

SEQ ID NO: 10809 - protein, 25 aa, Artificial
  helical interface sequence
LKLQVLLDEEYKQLVKDRKFLREVF

SEQ ID NO: 10810 - protein, 14 aa, Artificial
  helical interface sequence
LAMANSLRRVMIAE

SEQ ID NO: 10811 - protein, 7 aa, Artificial
  helical interface sequence
ESDLYKL

SEQ ID NO: 10812 - protein, 33 aa, Artificial; identical to SEQ ID NO: 3637
  helical interface sequence

SEQ ID NO: 10813 - protein, 5 aa, Artificial
  helical interface sequence
PGTRA

SEQ ID NO: 10814 - protein, 17 aa, Artificial
  helical interface sequence
IDEFTETTSKAIEVIGG

SEQ ID NO: 10815 - protein, 28 aa, Artificial
  helical interface sequence
DTWAKIHFAIMFVGVNMTFFPQHFLGLS

SEQ ID NO: 10816 - protein, 11 aa, Artificial
  helical interface sequence
SMKDFEEMRKA

SEQ ID NO: 10817 - protein, 28 aa, Artificial
  helical interface sequence
DTWAKIHFAIMFVGVNMTFFPQHFLGLS

SEQ ID NO: 10818 - protein, 11 aa, Artificial
  helical interface sequence
SMKDFEEMRKA

SEQ ID NO: 10819 - protein, 16 aa, Artificial
  helical interface sequence
LALPSVALCTLNSWLH

SEQ ID NO: 10820 - protein, 7 aa, Artificial
  helical interface sequence
HEWLRRA

SEQ ID NO: 10821 - protein, 6 aa, Artificial
  helical interface sequence
LMEIAE

SEQ ID NO: 10822 - protein, 12 aa, Artificial
  helical interface sequence
HESKLSILMDMF

SEQ ID NO: 10823 - protein, 14 aa, Artificial
  helical interface sequence
HVNQEVIKRMLNLE

SEQ ID NO: 10824 - protein, 10 aa, Artificial
  helical interface sequence
HLENEVARLK

SEQ ID NO: 10825 - protein, 16 aa, Artificial
  helical interface sequence
KSHIGRHLMTSFLSMK

SEQ ID NO: 10826 - protein, 15 aa, Artificial
  helical interface sequence
SHIGRHLMTSFLSMK

SEQ ID NO: 10827 - protein, 9 aa, Artificial
  helical interface sequence
WDTFVDLYG

SEQ ID NO: 10828 - protein, 26 aa, Artificial
  helical interface sequence
IESVHRWGWFFSLMVMVSASVGILLT

SEQ ID NO: 10829 - protein, 17 aa, Artificial
  helical interface sequence
TWFDTMLGFAISAYALK

SEQ ID NO: 10830 - protein, 17 aa, Artificial
  helical interface sequence
TWFDTMLGFAISAYALK

SEQ ID NO: 10831 - protein, 6 aa, Artificial
  helical interface sequence
PRVRAT

SEQ ID NO: 10832 - protein, 23 aa, Artificial
  helical interface sequence
AGIAIELVRLFAVELEHYEKIEG

SEQ ID NO: 10833 - protein, 14 aa, Artificial
  helical interface sequence
EVSDALVLQLIRIG

SEQ ID NO: 10834 - protein, 16 aa, Artificial
  helical interface sequence
AGAHGAEALERMFLGF

SEQ ID NO: 10835 - protein, 5 aa, Artificial
  helical interface sequence
MYMRR

SEQ ID NO: 10836 - protein, 11 aa, Artificial
  helical interface sequence
DDYVHEFCRYG

SEQ ID NO: 10837 - protein, 15 aa, Artificial
  helical interface sequence
IIARRWINGMLISLL

SEQ ID NO: 10838 - protein, 23 aa, Artificial
  helical interface sequence
AQGALANIAVDKANLDVMKERSN

SEQ ID NO: 10839 - protein, 12 aa, Artificial
  helical interface sequence
RIELSRLIGLLL

SEQ ID NO: 10840 - protein, 10 aa, Artificial
  helical interface sequence
YEELREQLSS

SEQ ID NO: 10841 - protein, 22 aa, Artificial
  helical interface sequence
QKSTQNAINGITNKVNSVIEKM

SEQ ID NO: 10842 - protein, 46 aa, Artificial; identical to SEQ ID NO: 556
  helical interface sequence

SEQ ID NO: 10843 - protein, 6 aa, Artificial
  helical interface sequence
WDFAKD

SEQ ID NO: 10844 - protein, 22 aa, Artificial
  helical interface sequence
AADTQAIADIVQYHLELYTSQY

SEQ ID NO: 10845 - protein, 19 aa, Artificial
  helical interface sequence
VQVAEEAIVNAMRVLYYRD

SEQ ID NO: 10846 - protein, 22 aa, Artificial
  helical interface sequence
IPDGRHLVNRGREEAASFKKLY

SEQ ID NO: 10847 - protein, 14 aa, Artificial
  helical interface sequence
FGAHMANPLLRKVV

SEQ ID NO: 10848 - protein, 18 aa, Artificial
  helical interface sequence
PSRLKCVVEKFAVNHINR

SEQ ID NO: 10849 - protein, 16 aa, Artificial
  helical interface sequence
AGAKAGLTFLVDLIKN

SEQ ID NO: 10850 - protein, 5 aa, Artificial
  helical interface sequence
RKWDW

SEQ ID NO: 10851 - protein, 14 aa, Artificial
  helical interface sequence
PAWQGFRELIEKAL

SEQ ID NO: 10852 - protein, 10 aa, Artificial
  helical interface sequence
PERIFRSIQE

SEQ ID NO: 10853 - protein, 16 aa, Artificial
  helical interface sequence
ANDLAKFHQMLMKIIM

SEQ ID NO: 10854 - protein, 11 aa, Artificial
  helical interface sequence
VSHLISYHMDN

SEQ ID NO: 10855 - protein, 13 aa, Artificial
  helical interface sequence
KEQKLRFAFRIYD

SEQ ID NO: 10856 - protein, 17 aa, Artificial
  helical interface sequence
DSVLFYAITTLHNLLLH

SEQ ID NO: 10857 - protein, 14 aa, Artificial
  helical interface sequence
ACEIRALARQWAKK

SEQ ID NO: 10858 - protein, 7 aa, Artificial
  helical interface sequence
EKELFES

SEQ ID NO: 10859 - protein, 10 aa, Artificial
  helical interface sequence
PIVVACFDAI

SEQ ID NO: 10860 - protein, 13 aa, Artificial
  helical interface sequence
AENFETFCEQLLA

SEQ ID NO: 10861 - protein, 11 aa, Artificial
  helical interface sequence
TVALREIRRYQ

SEQ ID NO: 10862 - protein, 18 aa, Artificial
  helical interface sequence
EAELEDTLNQVMVVFKYI

SEQ ID NO: 10863 - protein, 11 aa, Artificial
  helical interface sequence
RAQLLRNAYSW

SEQ ID NO: 10864 - protein, 19 aa, Artificial
  helical interface sequence
DIGEMYFMPPLMEALAQRA

SEQ ID NO: 10865 - protein, 15 aa, Artificial
  helical interface sequence
AKNYGRAVYECLRGG

SEQ ID NO: 10866 - protein, 21 aa, Artificial
  helical interface sequence
NAPGAAANRVALEACTQARNE

SEQ ID NO: 10867 - protein, 14 aa, Artificial
  helical interface sequence
AKNYGRAVYECLRG

SEQ ID NO: 10868 - protein, 24 aa, Artificial
  helical interface sequence
FLDQQAQERSMDKCLGWFLEPVVR

SEQ ID NO: 10869 - protein, 28 aa, Artificial
  helical interface sequence
DTWAKIHFAIMFVGVNMTFFPQHFLGLS

SEQ ID NO: 10870 - protein, 12 aa, Artificial
  helical interface sequence
HWKNQFDHYSKQ

SEQ ID NO: 10871 - protein, 6 aa, Artificial
  helical interface sequence
QSSIDR

SEQ ID NO: 10872 - protein, 14 aa, Artificial
  helical interface sequence
AKNYGRACYECLRG

SEQ ID NO: 10873 - protein, 14 aa, Artificial
  helical interface sequence
VEDLLKQIEYLLRS

SEQ ID NO: 10874 - protein, 19 aa, Artificial
  helical interface sequence
QGALRLMWELGEYLKALTG

SEQ ID NO: 10875 - protein, 19 aa, Artificial
  helical interface sequence
QGALRLMWELGEYLKALTG

SEQ ID NO: 10876 - protein, 19 aa, Artificial
  helical interface sequence
GAHGELTGILIIRAYHEDR

SEQ ID NO: 10877 - protein, 5 aa, Artificial
  helical interface sequence
AEDLI

SEQ ID NO: 10878 - protein, 7 aa, Artificial
  helical interface sequence
RFAKLLL

SEQ ID NO: 10879 - protein, 10 aa, Artificial
  helical interface sequence
YEEFVQMMTA

SEQ ID NO: 10880 - protein, 13 aa, Artificial
  helical interface sequence
SAEFIKNLSSIRR

SEQ ID NO: 10881 - protein, 20 aa, Artificial
  helical interface sequence
QLERNIETIINTFHQYSVKL

SEQ ID NO: 10882 - protein, 18 aa, Artificial
  helical interface sequence
ELEKALNSIIDVYHKYSL

SEQ ID NO: 10883 - protein, 11 aa, Artificial
  helical interface sequence
SLQYRTISGIS

SEQ ID NO: 10884 - protein, 18 aa, Artificial
  helical interface sequence
QKLKVKSAFLLQNLLVGH

SEQ ID NO: 10885 - protein, 18 aa, Artificial
  helical interface sequence
VEFLELLFHFHGTLRKLQ

SEQ ID NO: 10886 - protein, 19 aa, Artificial
  helical interface sequence
QTQLRQAVQLLTRTELTLK

SEQ ID NO: 10887 - protein, 19 aa, Artificial
  helical interface sequence
PENFRLLGNVLVVVLARHF

SEQ ID NO: 10888 - protein, 9 aa, Artificial
  helical interface sequence
DTFWDYVSL

SEQ ID NO: 10889 - protein, 13 aa, Artificial
  helical interface sequence
PYIRERVVDQLAH

SEQ ID NO: 10890 - protein, 12 aa, Artificial
  helical interface sequence
FILREKITHFDH

SEQ ID NO: 10891 - protein, 12 aa, Artificial
  helical interface sequence
FILREKITHFDH

SEQ ID NO: 10892 - protein, 9 aa, Artificial
  helical interface sequence
DTFWDYVSL

SEQ ID NO: 10893 - protein, 26 aa, Artificial
  helical interface sequence
YLFTAIVGAMGWGLIFYPGNWPIIAP

SEQ ID NO: 10894 - protein, 7 aa, Artificial
  helical interface sequence
YLWERYR

SEQ ID NO: 10895 - protein, 15 aa, Artificial
  helical interface sequence
PLQRLKVKRQWAEAY

SEQ ID NO: 10896 - protein, 13 aa, Artificial
  helical interface sequence
ESFRVLVKELQAL

SEQ ID NO: 10897 - protein, 8 aa, Artificial
  helical interface sequence
VAETNLHK

SEQ ID NO: 10898 - protein, 46 aa, Artificial; identical to SEQ ID NO: 588
  helical interface sequence

SEQ ID NO: 10899 - protein, 11 aa, Artificial
  helical interface sequence
VDDQMKLLQNC

SEQ ID NO: 10900 - protein, 6 aa, Artificial
  helical interface sequence
DEQLKS

SEQ ID NO: 10901 - protein, 17 aa, Artificial
  helical interface sequence
MEKLEQDFVSRVTECLT

SEQ ID NO: 10902 - protein, 35 aa, Artificial; identical to SEQ ID NO: 5251
  helical interface sequence

SEQ ID NO: 10903 - protein, 35 aa, Artificial; identical to SEQ ID NO: 5251
  helical interface sequence

SEQ ID NO: 10904 - protein, 35 aa, Artificial; identical to SEQ ID NO: 5251
  helical interface sequence

SEQ ID NO: 10905 - protein, 16 aa, Artificial
  helical interface sequence
LSLALYVFDEYLQKTV

SEQ ID NO: 10906 - protein, 22 aa, Artificial
  helical interface sequence
AADTEAVTQLIGSNIELHSLYT

SEQ ID NO: 10907 - protein, 22 aa, Artificial
  helical interface sequence
AADGDALVKRFKNSVKWYHFDH

SEQ ID NO: 10908 - protein, 19 aa, Artificial
  helical interface sequence
VEDALYLGKRSILAAAHRD

SEQ ID NO: 10909 - protein, 9 aa, Artificial
  helical interface sequence
YCNQMMRRR

SEQ ID NO: 10910 - protein, 10 aa, Artificial
  helical interface sequence
LKPLEEVLNL

SEQ ID NO: 10911 - protein, 41 aa, Artificial; identical to SEQ ID NO: 2156
  helical interface sequence

SEQ ID NO: 10912 - protein, 12 aa, Artificial
  helical interface sequence
PKDIQLARRIRG

SEQ ID NO: 10913 - protein, 29 aa, Artificial
  helical interface sequence
SSAVMALQEASEAYLVALFEDTNLCAIHA

SEQ ID NO: 10914 - protein, 29 aa, Artificial
  helical interface sequence
SSAVMALQEASEAYLVALFEDTNLCAIHA

SEQ ID NO: 10915 - protein, 11 aa, Artificial
  helical interface sequence
VADQMTLLQNC

SEQ ID NO: 10916 - protein, 11 aa, Artificial
  helical interface sequence
REIQTAVRLLL

SEQ ID NO: 10917 - protein, 13 aa, Artificial
  helical interface sequence
LGPFIVDLITFTE

SEQ ID NO: 10918 - protein, 16 aa, Artificial
  helical interface sequence
QKEIDRLNEVAKNLNE

SEQ ID NO: 10919 - protein, 35 aa, Artificial; identical to SEQ ID NO: 10106
  helical interface sequence

SEQ ID NO: 10920 - protein, 28 aa, Artificial
  helical interface sequence
LALRLMLQLVIVVALVVYVIYGFVVVWG

SEQ ID NO: 10921 - protein, 15 aa, Artificial
  helical interface sequence
QQNMKDGLQNCKATY

SEQ ID NO: 10922 - protein, 9 aa, Artificial
  helical interface sequence
KEYQELNFQ

SEQ ID NO: 10923 - protein, 12 aa, Artificial
  helical interface sequence
SHEVSTWVKKIL

SEQ ID NO: 10924 - protein, 9 aa, Artificial
  helical interface sequence
MGNMKYLYD

SEQ ID NO: 10925 - protein, 8 aa, Artificial
  helical interface sequence
KRWYRLAS

SEQ ID NO: 10926 - protein, 9 aa, Artificial
  helical interface sequence
KASAMFRLG

SEQ ID NO: 10927 - protein, 15 aa, Artificial
  helical interface sequence
ISGTFNFMIVFQAEH

SEQ ID NO: 10928 - protein, 20 aa, Artificial
  helical interface sequence
TPLMAVFMGLFLVFLLIILE

SEQ ID NO: 10929 - protein, 28 aa, Artificial
  helical interface sequence
TILFQLALAALVILSFVMVIGVPVAYAS

SEQ ID NO: 10930 - protein, 13 aa, Artificial
  helical interface sequence
NSLANVLSQHLNQ

SEQ ID NO: 10931 - protein, 9 aa, Artificial
  helical interface sequence
DTLMQRLRN

SEQ ID NO: 10932 - protein, 29 aa, Artificial
  helical interface sequence
KEARAAIARAASVFAIFVTSSSTALAHKQ

SEQ ID NO: 10933 - protein, 17 aa, Artificial
  helical interface sequence
KDEVKELIWKSSLEVLG

SEQ ID NO: 10934 - protein, 15 aa, Artificial
  helical interface sequence
VEDALTYLDQVKIRF

SEQ ID NO: 10935 - protein, 7 aa, Artificial
  helical interface sequence
ETEAGRL

SEQ ID NO: 10936 - protein, 6 aa, Artificial
  helical interface sequence
SNLSRF

SEQ ID NO: 10937 - protein, 12 aa, Artificial
  helical interface sequence
AELVDALQFVCG

SEQ ID NO: 10938 - protein, 9 aa, Artificial
  helical interface sequence
AEERRRKQN

SEQ ID NO: 10939 - protein, 12 aa, Artificial
  helical interface sequence
WFNNYKRSLATY

SEQ ID NO: 10940 - protein, 16 aa, Artificial
  helical interface sequence
LCLQRLQEERKKWRKD

SEQ ID NO: 10941 - protein, 14 aa, Artificial
  helical interface sequence
AGELIAEAALALEM

SEQ ID NO: 10942 - protein, 13 aa, Artificial
  helical interface sequence
GEYRRRWKREVLG

SEQ ID NO: 10943 - protein, 19 aa, Artificial
  helical interface sequence
QAICVLRVRLLQTYDIESS

SEQ ID NO: 10944 - protein, 10 aa, Artificial
  helical interface sequence
ASNAITRLER

SEQ ID NO: 10945 - protein, 5 aa, Artificial
  helical interface sequence
YICGE

SEQ ID NO: 10946 - protein, 9 aa, Artificial
  helical interface sequence
FFFTKLKTA

SEQ ID NO: 10947 - protein, 5 aa, Artificial
  helical interface sequence
ERFRK

SEQ ID NO: 10948 - protein, 11 aa, Artificial
  helical interface sequence
GENMSSATYIN

SEQ ID NO: 10949 - protein, 23 aa, Artificial
  helical interface sequence
EPEIKELLAEAFNLYFGKRQGEG

SEQ ID NO: 10950 - protein, 14 aa, Artificial
  helical interface sequence
LEHRERSLQTLRDI

SEQ ID NO: 10951 - protein, 15 aa, Artificial
  helical interface sequence
MDKINNRFNYLFEVN

SEQ ID NO: 10952 - protein, 15 aa, Artificial
  helical interface sequence
KKKLKEVHRKIMLAN

SEQ ID NO: 10953 - protein, 9 aa, Artificial
  helical interface sequence
FFQFAEMIV

SEQ ID NO: 10954 - protein, 7 aa, Artificial
  helical interface sequence
SDFQCKD

SEQ ID NO: 10955 - protein, 11 aa, Artificial
  helical interface sequence
PKDIQLARRIR

SEQ ID NO: 10956 - protein, 15 aa, Artificial
  helical interface sequence
LSKQAVAYRQLSLLL

SEQ ID NO: 10957 - protein, 15 aa, Artificial
  helical interface sequence
TGSAARNGVLSAWLS

SEQ ID NO: 10958 - protein, 5 aa, Artificial
  helical interface sequence
GIYAA

SEQ ID NO: 10959 - protein, 14 aa, Artificial
  helical interface sequence
FEDFVTALSILLRG

SEQ ID NO: 10960 - protein, 19 aa, Artificial
  helical interface sequence
LPNVMMSADAMLEGIEYCK

SEQ ID NO: 10961 - protein, 12 aa, Artificial
  helical interface sequence
CAQANTAMFIGG

SEQ ID NO: 10962 - protein, 5 aa, Artificial
  helical interface sequence
FKLIY

SEQ ID NO: 10963 - protein, 6 aa, Artificial
  helical interface sequence
ANVRFN

SEQ ID NO: 10964 - protein, 8 aa, Artificial
  helical interface sequence
PEAFGVHG

SEQ ID NO: 10965 - protein, 17 aa, Artificial
  helical interface sequence
GPCKMIKPFFHSLSEKY

SEQ ID NO: 10966 - protein, 23 aa, Artificial
  helical interface sequence
AYWKYQAEKEKKLYAIFDAFAQN

SEQ ID NO: 10967 - protein, 7 aa, Artificial
  helical interface sequence
PVHQIYQ

SEQ ID NO: 10968 - protein, 11 aa, Artificial
  helical interface sequence
STTMIRILKEM

SEQ ID NO: 10969 - protein, 9 aa, Artificial
  helical interface sequence
FFFTKLKTA

SEQ ID NO: 10970 - protein, 11 aa, Artificial
  helical interface sequence
ESVIARDKALD

SEQ ID NO: 10971 - protein, 10 aa, Artificial
  helical interface sequence
KTTILYKLKL

SEQ ID NO: 10972 - protein, 5 aa, Artificial
  helical interface sequence
RPFCT

SEQ ID NO: 10973 - protein, 27 aa, Artificial
  helical interface sequence
LQDIDQAENTARSTAVKLLEELKKHLG

SEQ ID NO: 10974 - protein, 38 aa, Artificial
  helical interface sequence
LKDITRRLKSIKNIQKITKSMKMVAAAKYARAERELKP

SEQ ID NO: 10975 - protein, 12 aa, Artificial
  helical interface sequence
LATDMGTMQERI

SEQ ID NO: 10976 - protein, 7 aa, Artificial
  helical interface sequence
WYVWGQN

SEQ ID NO: 10977 - protein, 18 aa, Artificial
  helical interface sequence
PEVQYVALRNINLIVQKR

SEQ ID NO: 10978 - protein, 13 aa, Artificial
  helical interface sequence
DMKRTINKAWVES

SEQ ID NO: 10979 - protein, 12 aa, Artificial
  helical interface sequence
VDILGRVWELSD

SEQ ID NO: 10980 - protein, 6 aa, Artificial
  helical interface sequence
DRLRPL

SEQ ID NO: 10981 - protein, 11 aa, Artificial
  helical interface sequence
PRVLRELVPIV

SEQ ID NO: 10982 - protein, 10 aa, Artificial
  helical interface sequence
WRVRYMVADK

SEQ ID NO: 10983 - protein, 12 aa, Artificial
  helical interface sequence
PKDIQLARRIRG

SEQ ID NO: 10984 - protein, 31 aa, Artificial
  helical interface sequence
LENALYALSAVGHFTLGSVLEDQEHQVAKEE

SEQ ID NO: 10985 - protein, 30 aa, Artificial
  helical interface sequence
LENALYALSAVGHFTLGSVLEDQEHQVAKE

SEQ ID NO: 10986 - protein, 15 aa, Artificial
  helical interface sequence
ESVLNVIAADVTLVG

SEQ ID NO: 10987 - protein, 15 aa, Artificial
  helical interface sequence
ESVLNVIAADVTLVG

SEQ ID NO: 10988 - protein, 14 aa, Artificial
  helical interface sequence
GTLTYEAVKQTTDY

SEQ ID NO: 10989 - protein, 16 aa, Artificial
  helical interface sequence
TEYLRDRVAHLRTELG

SEQ ID NO: 10990 - protein, 11 aa, Artificial
  helical interface sequence
STTMRRLIDTY

SEQ ID NO: 10991 - protein, 12 aa, Artificial
  helical interface sequence
ERVKRGMAEMQK

SEQ ID NO: 10992 - protein, 11 aa, Artificial
  helical interface sequence
STTMRRLIDTY

SEQ ID NO: 10993 - protein, 11 aa, Artificial
  helical interface sequence
PKDIQLARRIR

SEQ ID NO: 10994 - protein, 10 aa, Artificial
  helical interface sequence
PRHLQLAVRN

SEQ ID NO: 10995 - protein, 12 aa, Artificial
  helical interface sequence
KTQLIDVIAEKA

SEQ ID NO: 10996 - protein, 19 aa, Artificial
  helical interface sequence
PIRLGLALNFSVFYYEILN

SEQ ID NO: 10997 - protein, 5 aa, Artificial
  helical interface sequence
FITTI

SEQ ID NO: 10998 - protein, 17 aa, Artificial
  helical interface sequence
TAKLVSKAHRIFEEFVD

SEQ ID NO: 10999 - protein, 18 aa, Artificial
  helical interface sequence
NQHLCGSHLVEALYLVCG

SEQ ID NO: 11000 - protein, 13 aa, Artificial
  helical interface sequence
EYEISFINHRILN

SEQ ID NO: 11001 - protein, 10 aa, Artificial
  helical interface sequence
KEIIDLIQTH

SEQ ID NO: 11002 - protein, 13 aa, Artificial
  helical interface sequence
PELSYLSTLIRYE

SEQ ID NO: 11003 - protein, 6 aa, Artificial
  helical interface sequence
DSVRLL

SEQ ID NO: 11004 - protein, 11 aa, Artificial
  helical interface sequence
EEAIAEAKEIM

SEQ ID NO: 11005 - protein, 12 aa, Artificial
  helical interface sequence
EKAMELIRELHR

SEQ ID NO: 11006 - protein, 16 aa, Artificial
  helical interface sequence
QLAELQWQRQQEWRNE

SEQ ID NO: 11007 - protein, 8 aa, Artificial
  helical interface sequence
KEDFRYRS

SEQ ID NO: 11008 - protein, 13 aa, Artificial
  helical interface sequence
VNLAVNNLLSRDD

SEQ ID NO: 11009 - protein, 11 aa, Artificial
  helical interface sequence
ERQVDQLASLG

SEQ ID NO: 11010 - protein, 19 aa, Artificial
  helical interface sequence
IPMAEKKLAQIGDEINEKW

SEQ ID NO: 11011 - protein, 9 aa, Artificial
  helical interface sequence
HSIQTWLLG

SEQ ID NO: 11012 - protein, 7 aa, Artificial
  helical interface sequence
IEEDFNA

SEQ ID NO: 11013 - protein, 17 aa, Artificial
  helical interface sequence
VHAMAEDVSAFLMWAAE

SEQ ID NO: 11014 - protein, 15 aa, Artificial
  helical interface sequence
VDLAFASVEHIMRNV

SEQ ID NO: 11015 - protein, 11 aa, Artificial
  helical interface sequence
IGHSIQTWLLG

SEQ ID NO: 11016 - protein, 15 aa, Artificial
  helical interface sequence
VDLAFASVEHIMRNV

SEQ ID NO: 11017 - protein, 11 aa, Artificial
  helical interface sequence
IGHSIQTWLLG

SEQ ID NO: 11018 - protein, 15 aa, Artificial
  helical interface sequence
VDLAFASVEHIMRNV

SEQ ID NO: 11019 - protein, 29 aa, Artificial
  helical interface sequence
RRDFLYYATAGAGAVATGAAVWPLINQMN

SEQ ID NO: 11020 - protein, 15 aa, Artificial
  helical interface sequence
AIDAAVAIGFALAVV

SEQ ID NO: 11021 - protein, 5 aa, Artificial
  helical interface sequence
SYDVL

SEQ ID NO: 11022 - protein, 14 aa, Artificial
  helical interface sequence
FLDLCAMLVCKLFS

SEQ ID NO: 11023 - protein, 14 aa, Artificial
  helical interface sequence
DFGEKWFRKVITAL

SEQ ID NO: 11024 - protein, 11 aa, Artificial
  helical interface sequence
LAPLLENISAR

SEQ ID NO: 11025 - protein, 14 aa, Artificial
  helical interface sequence
GELSAKWAPIAAEA

SEQ ID NO: 11026 - protein, 17 aa, Artificial
  helical interface sequence
SKAQLAAITLIIGTFER

SEQ ID NO: 11027 - protein, 12 aa, Artificial
  helical interface sequence
VWVEYIQLAAQY

SEQ ID NO: 11028 - protein, 19 aa, Artificial
  helical interface sequence
PAVHASLDKFLANVSTVLT

SEQ ID NO: 11029 - protein, 10 aa, Artificial
  helical interface sequence
RSERRKWIHC

SEQ ID NO: 11030 - protein, 34 aa, Artificial
  helical interface sequence
RKLLLTAQQMLQDSKTKIDIIRMQLRRALQADQL

SEQ ID NO: 11031 - protein, 13 aa, Artificial
  helical interface sequence
VAQIDALSQMVAE

SEQ ID NO: 11032 - protein, 16 aa, Artificial
  helical interface sequence
PHVFIYCAFIEYYATG

SEQ ID NO: 11033 - protein, 7 aa, Artificial
  helical interface sequence
DGSVGYS

SEQ ID NO: 11034 - protein, 10 aa, Artificial
  helical interface sequence
VTPIANAWLD

SEQ ID NO: 11035 - protein, 15 aa, Artificial
  helical interface sequence
TEEQLLAVQAIRKYG

SEQ ID NO: 11036 - protein, 10 aa, Artificial
  helical interface sequence
IPQSRELIAQ

SEQ ID NO: 11037 - protein, 15 aa, Artificial
  helical interface sequence
HTIEFFEMCANLIKI

SEQ ID NO: 11038 - protein, 11 aa, Artificial
  helical interface sequence
EAELQDMINEV

SEQ ID NO: 11039 - protein, 11 aa, Artificial
  helical interface sequence
NTLLSEYAYVL

SEQ ID NO: 11040 - protein, 16 aa, Artificial
  helical interface sequence
FSAFLANVRKAFTATV

SEQ ID NO: 11041 - protein, 14 aa, Artificial
  helical interface sequence
PEVQYVALRNINLI

SEQ ID NO: 11042 - protein, 8 aa, Artificial
  helical interface sequence
LREVNRTF

SEQ ID NO: 11043 - protein, 21 aa, Artificial
  helical interface sequence
WGRIVTIFAFGGVLLKKLKQE

SEQ ID NO: 11044 - protein, 40 aa, Artificial
  helical interface sequence
ATEKENLRLALDAMRDLAQCVNEVKRDNETLRQITNFQLS

SEQ ID NO: 11045 - protein, 18 aa, Artificial
  helical interface sequence
SRIKFKLIDIKELRHDKN

SEQ ID NO: 11046 - protein, 17 aa, Artificial
  helical interface sequence
RYEIARVISARALQLAM

SEQ ID NO: 11047 - protein, 14 aa, Artificial
  helical interface sequence
LEFVNAIRRAAMLY

SEQ ID NO: 11048 - protein, 12 aa, Artificial
  helical interface sequence
YCRHNYGVVESF

SEQ ID NO: 11049 - protein, 12 aa, Artificial
  helical interface sequence
DEEVDEMIREAD

SEQ ID NO: 11050 - protein, 18 aa, Artificial
  helical interface sequence
LGTIKSRIRLALDRLRQH

SEQ ID NO: 11051 - protein, 5 aa, Artificial
  helical interface sequence
TVWQK

SEQ ID NO: 11052 - protein, 20 aa, Artificial
  helical interface sequence
KVTAMKCFLLELQVISLESG

SEQ ID NO: 11053 - protein, 23 aa, Artificial
  helical interface sequence
AADTEAVTQLIGSNIELHSLYTS

SEQ ID NO: 11054 - protein, 19 aa, Artificial
  helical interface sequence
KEEAIKLASDAIQAGIWND

SEQ ID NO: 11055 - protein, 22 aa, Artificial
  helical interface sequence
IPDGRHLVNRGREEAASFKKLY

SEQ ID NO: 11056 - protein, 5 aa, Artificial
  helical interface sequence
QVIDG

SEQ ID NO: 11057 - protein, 12 aa, Artificial
  helical interface sequence
LTEVYCLVNRAR

SEQ ID NO: 11058 - protein, 12 aa, Artificial
  helical interface sequence
KNELKQALSGFG

SEQ ID NO: 11059 - protein, 23 aa, Artificial
  helical interface sequence
PVATTVFLFGTLVTLWLGIGAAL

SEQ ID NO: 11060 - protein, 15 aa, Artificial
  helical interface sequence
NQFFLQTALNAVRSY

SEQ ID NO: 11061 - protein, 13 aa, Artificial
  helical interface sequence
VLQEQVFKDLKSR

SEQ ID NO: 11062 - protein, 5 aa, Artificial
  helical interface sequence
RAWMA

SEQ ID NO: 11063 - protein, 24 aa, Artificial
  helical interface sequence
ETLKITVYIVVTFFVLLFVFGFLS

SEQ ID NO: 11064 - protein, 7 aa, Artificial
  helical interface sequence
DEQLKSG

SEQ ID NO: 11065 - protein, 26 aa, Artificial
  helical interface sequence
AEENFLILTEMATNHVQVLVEFTKKL

SEQ ID NO: 11066 - protein, 14 aa, Artificial
  helical interface sequence
KLGDGLFRNIITEI

SEQ ID NO: 11067 - protein, 26 aa, Artificial
  helical interface sequence
LGAHVAHAGLIVFWAGAMTLFELAHF

SEQ ID NO: 11068 - protein, 10 aa, Artificial
  helical interface sequence
SGSLANNIKK

SEQ ID NO: 11069 - protein, 11 aa, Artificial
  helical interface sequence
AMDVVYALKRQ

SEQ ID NO: 11070 - protein, 22 aa, Artificial
  helical interface sequence
VGDAQVLVRYMKAELELYRLQR

SEQ ID NO: 11071 - protein, 25 aa, Artificial
  helical interface sequence
LSQERTARLNELQRALVMMDSDFRQ

SEQ ID NO: 11072 - protein, 7 aa, Artificial
  helical interface sequence
LVVPALW

SEQ ID NO: 11073 - protein, 7 aa, Artificial
  helical interface sequence
LVVPALW

SEQ ID NO: 11074 - protein, 7 aa, Artificial
  helical interface sequence
LVVPALW

SEQ ID NO: 11075 - protein, 6 aa, Artificial
  helical interface sequence
ISEMRV

SEQ ID NO: 11076 - protein, 8 aa, Artificial
  helical interface sequence
VEMLDRLY

SEQ ID NO: 11077 - protein, 32 aa, Artificial
  helical interface sequence
VIAQTNWKFVEGLLKECRNKTKRMLVEKMGRE

SEQ ID NO: 11078 - protein, 33 aa, Artificial; identical to SEQ ID NO: 9213
  helical interface sequence

SEQ ID NO: 11079 - protein, 22 aa, Artificial
  helical interface sequence
PHELTESVLPAARYDYAVAEQC

SEQ ID NO: 11080 - protein, 16 aa, Artificial
  helical interface sequence
YKVAINEAIELAKSFG

SEQ ID NO: 11081 - protein, 42 aa, Artificial; identical to SEQ ID NO: 8298
  helical interface sequence

SEQ ID NO: 11082 - protein, 9 aa, Artificial
  helical interface sequence
PENILSAYQ

SEQ ID NO: 11083 - protein, 21 aa, Artificial
  helical interface sequence
HTIAAFLGGAAAQEVIKIITK

SEQ ID NO: 11084 - protein, 13 aa, Artificial
  helical interface sequence
PSQFIEEVKHLLN

SEQ ID NO: 11085 - protein, 22 aa, Artificial
  helical interface sequence
YPEYVSIQREKDAGAYSVKAAL

SEQ ID NO: 11086 - protein, 18 aa, Artificial
  helical interface sequence
PEVHASLDKFVLAVGTVL

SEQ ID NO: 11087 - protein, 16 aa, Artificial
  helical interface sequence
MLAGTMFLLWLGERIT

SEQ ID NO: 11088 - protein, 12 aa, Artificial
  helical interface sequence
GRDVTYFVQSLL

SEQ ID NO: 11089 - protein, 16 aa, Artificial
  helical interface sequence
GESLLGTQLLVDVVTG

SEQ ID NO: 11090 - protein, 8 aa, Artificial
  helical interface sequence
TYADFIAS

SEQ ID NO: 11091 - protein, 8 aa, Artificial
  helical interface sequence
TYADFIAS

SEQ ID NO: 11092 - protein, 12 aa, Artificial
  helical interface sequence
THSTVLGLYNTL

SEQ ID NO: 11093 - protein, 18 aa, Artificial
  helical interface sequence
PDEFQKILDFMKDVMKKL

SEQ ID NO: 11094 - protein, 9 aa, Artificial
  helical interface sequence
EIGIEMKFK

SEQ ID NO: 11095 - protein, 9 aa, Artificial
  helical interface sequence
EIGIEMKFK

SEQ ID NO: 11096 - protein, 10 aa, Artificial
  helical interface sequence
LLAYLRRKLG

SEQ ID NO: 11097 - protein, 12 aa, Artificial
  helical interface sequence
VKDIIFAIKKTL

SEQ ID NO: 11098 - protein, 16 aa, Artificial
  helical interface sequence
AIADLSVNMYNRLRAT

SEQ ID NO: 11099 - protein, 8 aa, Artificial
  helical interface sequence
PLHWACRE

SEQ ID NO: 11100 - protein, 15 aa, Artificial
  helical interface sequence
LEKIEPAQEEHEKYH

SEQ ID NO: 11101 - protein, 23 aa, Artificial
  helical interface sequence
PAEVEALREKVYASLEAYCKHKY

SEQ ID NO: 11102 - protein, 8 aa, Artificial
  helical interface sequence
FLMEMLEA

SEQ ID NO: 11103 - protein, 11 aa, Artificial
  helical interface sequence
VAENMSFGLKL

SEQ ID NO: 11104 - protein, 15 aa, Artificial
  helical interface sequence
LSKQAVAYRQLSLLL

SEQ ID NO: 11105 - protein, 35 aa, Artificial; identical to SEQ ID NO: 4036
  helical interface sequence

SEQ ID NO: 11106 - protein, 12 aa, Artificial
  helical interface sequence
PGTVLDWCSKLK

SEQ ID NO: 11107 - protein, 6 aa, Artificial
  helical interface sequence
SEELQA

SEQ ID NO: 11108 - protein, 16 aa, Artificial
  helical interface sequence
WAAIAAKHFFDDIITG

SEQ ID NO: 11109 - protein, 13 aa, Artificial
  helical interface sequence
ELHHSYHMGVWYW

SEQ ID NO: 11110 - protein, 25 aa, Artificial
  helical interface sequence
TCGIADFLSTYQTKVDKDLQSLEDI

SEQ ID NO: 11111 - protein, 19 aa, Artificial
  helical interface sequence
QTQLRQAVQLLTRTELTLK

SEQ ID NO: 11112 - protein, 7 aa, Artificial
  helical interface sequence
REKALMN

SEQ ID NO: 11113 - protein, 7 aa, Artificial
  helical interface sequence
REKALMN

SEQ ID NO: 11114 - protein, 16 aa, Artificial
  helical interface sequence
WYIQSLCQSLRERCPR

SEQ ID NO: 11115 - protein, 13 aa, Artificial
  helical interface sequence
RVLNAACQRLARA

SEQ ID NO: 11116 - protein, 41 aa, Artificial; identical to SEQ ID NO: 450
  helical interface sequence

SEQ ID NO: 11117 - protein, 10 aa, Artificial
  helical interface sequence
DNTLFKWMIF

SEQ ID NO: 11118 - protein, 19 aa, Artificial
  helical interface sequence
EYGKWLMDNLFRVFIRFVE

SEQ ID NO: 11119 - protein, 14 aa, Artificial
  helical interface sequence
WQMLEMLKPCVEDG

SEQ ID NO: 11120 - protein, 7 aa, Artificial
  helical interface sequence
SDLYKLK

SEQ ID NO: 11121 - protein, 12 aa, Artificial
  helical interface sequence
HTLGNLIRAELL

SEQ ID NO: 11122 - protein, 11 aa, Artificial
  helical interface sequence
EETRAELSQLC

SEQ ID NO: 11123 - protein, 11 aa, Artificial
  helical interface sequence
ESTQLLMKYLG

SEQ ID NO: 11124 - protein, 15 aa, Artificial
  helical interface sequence
AKNYGRAVYECLRGG

SEQ ID NO: 11125 - protein, 13 aa, Artificial
  helical interface sequence
EYALAAYRKIARD

SEQ ID NO: 11126 - protein, 6 aa, Artificial
  helical interface sequence
SEQLTS

SEQ ID NO: 11127 - protein, 6 aa, Artificial
  helical interface sequence
DEQLKS

SEQ ID NO: 11128 - protein, 13 aa, Artificial
  helical interface sequence
SASQALHSDWLAR

SEQ ID NO: 11129 - protein, 5 aa, Artificial
  helical interface sequence
MTDFY

SEQ ID NO: 11130 - protein, 9 aa, Artificial
  helical interface sequence
LKETYNSLG

SEQ ID NO: 11131 - protein, 9 aa, Artificial
  helical interface sequence
VHAYLAEFD

SEQ ID NO: 11132 - protein, 14 aa, Artificial
  helical interface sequence
ERSWFREAEIYQTV

SEQ ID NO: 11133 - protein, 21 aa, Artificial
  helical interface sequence
RRYTEVYLEHRMQEAVEAERA

SEQ ID NO: 11134 - protein, 21 aa, Artificial
  helical interface sequence
RRYTEVYLEHRMQEAVEAERA

SEQ ID NO: 11135 - protein, 30 aa, Artificial
  helical interface sequence
PEYWDGETRKVKAHSQTHRVDLGTLRGYYN

SEQ ID NO: 11136 - protein, 35 aa, Artificial; identical to SEQ ID NO: 5344
  helical interface sequence

SEQ ID NO: 11137 - protein, 19 aa, Artificial
  helical interface sequence
DAAPLFDHFIELIEQYRKT

SEQ ID NO: 11138 - protein, 11 aa, Artificial
  helical interface sequence
AAELRHVMTNL

SEQ ID NO: 11139 - protein, 19 aa, Artificial
  helical interface sequence
PVTHCAVDKFLELVAYELS

SEQ ID NO: 11140 - protein, 20 aa, Artificial
  helical interface sequence
TQNFKLLGQTFMVELALHYK

SEQ ID NO: 11141 - protein, 18 aa, Artificial
  helical interface sequence
GGLINKKCYEMASHLRRS

SEQ ID NO: 11142 - protein, 11 aa, Artificial
  helical interface sequence
VQTLFALFKKL

SEQ ID NO: 11143 - protein, 15 aa, Artificial
  helical interface sequence
RPWLCYWILHSLELL

SEQ ID NO: 11144 - protein, 12 aa, Artificial
  helical interface sequence
LKSLLQWVTSRQ

SEQ ID NO: 11145 - protein, 9 aa, Artificial
  helical interface sequence
RPDAEYWNK

SEQ ID NO: 11146 - protein, 11 aa, Artificial
  helical interface sequence
PDMVWDFWSLR

SEQ ID NO: 11147 - protein, 7 aa, Artificial
  helical interface sequence
YFAEVEQ

SEQ ID NO: 11148 - protein, 9 aa, Artificial
  helical interface sequence
KNFLEASYD

SEQ ID NO: 11149 - protein, 12 aa, Artificial
  helical interface sequence
AAVADLSFAAKA

SEQ ID NO: 11150 - protein, 7 aa, Artificial
  helical interface sequence
RMPAKLD

SEQ ID NO: 11151 - protein, 7 aa, Artificial
  helical interface sequence
RMPAKLD

SEQ ID NO: 11152 - protein, 11 aa, Artificial
  helical interface sequence
LFSVVPELTGK

SEQ ID NO: 11153 - protein, 29 aa, Artificial
  helical interface sequence
SSAVMALQEASEAYLVGLFEDTNLCAIHA

SEQ ID NO: 11154 - protein, 12 aa, Artificial
  helical interface sequence
SREIQTAVRLLL

SEQ ID NO: 11155 - protein, 12 aa, Artificial
  helical interface sequence
VITTVISAADSA

SEQ ID NO: 11156 - protein, 12 aa, Artificial
  helical interface sequence
PQAVLDVLEFYN

SEQ ID NO: 11157 - protein, 29 aa, Artificial
  helical interface sequence
SKAMSIMNSFVNDVFERIAGEASRLAHYN

SEQ ID NO: 11158 - protein, 11 aa, Artificial
  helical interface sequence
PRHLQLAIRGD

SEQ ID NO: 11159 - protein, 5 aa, Artificial
  helical interface sequence
CAGCH

SEQ ID NO: 11160 - protein, 5 aa, Artificial
  helical interface sequence
PQVRN

SEQ ID NO: 11161 - protein, 19 aa, Artificial
  helical interface sequence
VEDALYLGKRSILAAAHRD

SEQ ID NO: 11162 - protein, 22 aa, Artificial
  helical interface sequence
ADCQFWETWLGSQCRLHELREK

SEQ ID NO: 11163 - protein, 23 aa, Artificial
  helical interface sequence
AGDTVQFAEYIQANIQLYSIRED

SEQ ID NO: 11164 - protein, 21 aa, Artificial
  helical interface sequence
DAAQTHIYMLMKKDSYARYLK

SEQ ID NO: 11165 - protein, 22 aa, Artificial
  helical interface sequence
AADCQFWETWLGSQCRLHELRE

SEQ ID NO: 11166 - protein, 19 aa, Artificial
  helical interface sequence
TEEGLDLLKLCVQELEKRM

SEQ ID NO: 11167 - protein, 22 aa, Artificial
  helical interface sequence
IPDGRHLVNRGREEAASFKKLY

SEQ ID NO: 11168 - protein, 45 aa, Artificial; identical to SEQ ID NO: 5362
  helical interface sequence

SEQ ID NO: 11169 - protein, 11 aa, Artificial
  helical interface sequence
LLKSAVELAKD

SEQ ID NO: 11170 - protein, 18 aa, Artificial
  helical interface sequence
TADAFTLFELFERKLEMH

SEQ ID NO: 11171 - protein, 17 aa, Artificial
  helical interface sequence
FQKTGSACLLVASKLRS

SEQ ID NO: 11172 - protein, 25 aa, Artificial
  helical interface sequence
SRRMAACLRDMEIILRYVTYAVFAG

SEQ ID NO: 11173 - protein, 25 aa, Artificial
  helical interface sequence
SRRMAACLRDMEIILRYVTYAVFAG

SEQ ID NO: 11174 - protein, 13 aa, Artificial
  helical interface sequence
PISFKWVMRAKDK

SEQ ID NO: 11175 - protein, 11 aa, Artificial
  helical interface sequence
AQRVQEVFAWT

SEQ ID NO: 11176 - protein, 28 aa, Artificial
  helical interface sequence
SGIKSLYVRLRNLTVILWAIYPFIWLLG

SEQ ID NO: 11177 - protein, 6 aa, Artificial
  helical interface sequence
DRLRPL

SEQ ID NO: 11178 - protein, 12 aa, Artificial
  helical interface sequence
EDGDQGIVRLKE

SEQ ID NO: 11179 - protein, 7 aa, Artificial
  helical interface sequence
EEFGRFA

SEQ ID NO: 11180 - protein, 18 aa, Artificial
  helical interface sequence
AEVHASLDKFLCAVGTVL

SEQ ID NO: 11181 - protein, 23 aa, Artificial
  helical interface sequence
PEFLEQKRAEVDTVCRHNYEIFD

SEQ ID NO: 11182 - protein, 22 aa, Artificial
  helical interface sequence
ADAELQRLKNERHEEAELERLK

SEQ ID NO: 11183 - protein, 10 aa, Artificial
  helical interface sequence
IDENLKAADS

SEQ ID NO: 11184 - protein, 12 aa, Artificial
  helical interface sequence
KPLQDALVEYFG

SEQ ID NO: 11185 - protein, 15 aa, Artificial
  helical interface sequence
EEQIAEFKEAFSLFD

SEQ ID NO: 11186 - protein, 14 aa, Artificial
  helical interface sequence
AKNYGRAVYECLRG

SEQ ID NO: 11187 - protein, 23 aa, Artificial
  helical interface sequence
TSDANVLTNELRLIAQRYLLQYQ

SEQ ID NO: 11188 - protein, 13 aa, Artificial
  helical interface sequence
YGAFLTLSILDRY

SEQ ID NO: 11189 - protein, 23 aa, Artificial
  helical interface sequence
EPEIKELLAQAFEVYFGKRKGEG

SEQ ID NO: 11190 - protein, 13 aa, Artificial
  helical interface sequence
IEGRNAAYEAIIK

SEQ ID NO: 11191 - protein, 14 aa, Artificial
  helical interface sequence
VVEDLSAVEEMMKR

SEQ ID NO: 11192 - protein, 10 aa, Artificial
  helical interface sequence
AQDLIKEALK

SEQ ID NO: 11193 - protein, 12 aa, Artificial
  helical interface sequence
FQVEYALEAIKQ

SEQ ID NO: 11194 - protein, 21 aa, Artificial
  helical interface sequence
NADSRILIEKARVEAQSHRLT

SEQ ID NO: 11195 - protein, 22 aa, Artificial
  helical interface sequence
APDARVLSNYLRQQCNYSSLVF

SEQ ID NO: 11196 - protein, 16 aa, Artificial
  helical interface sequence
ADTIGTETLERLFLSH

SEQ ID NO: 11197 - protein, 16 aa, Artificial
  helical interface sequence
ADEVGGEALGRLLVVY

SEQ ID NO: 11198 - protein, 6 aa, Artificial
  helical interface sequence
SEQLTS

SEQ ID NO: 11199 - protein, 10 aa, Artificial
  helical interface sequence
HRAARIAARK

SEQ ID NO: 11200 - protein, 6 aa, Artificial
  helical interface sequence
ARAHVT

SEQ ID NO: 11201 - protein, 6 aa, Artificial
  helical interface sequence
AKAALA

SEQ ID NO: 11202 - protein, 27 aa, Artificial
  helical interface sequence
GCKLQDTLVRQERPIRKSIEDLRNTVD

SEQ ID NO: 11203 - protein, 17 aa, Artificial
  helical interface sequence
RLPALRSIGLKCLEHLF

SEQ ID NO: 11204 - protein, 8 aa, Artificial
  helical interface sequence
PLLQEIYR

SEQ ID NO: 11205 - protein, 8 aa, Artificial
  helical interface sequence
HADYLLRT

SEQ ID NO: 11206 - protein, 13 aa, Artificial
  helical interface sequence
FARHNLLQTLYNI

SEQ ID NO: 11207 - protein, 10 aa, Artificial
  helical interface sequence
TNETTKSIER

SEQ ID NO: 11208 - protein, 10 aa, Artificial
  helical interface sequence
PRHLQLAVRN

SEQ ID NO: 11209 - protein, 30 aa, Artificial; identical to SEQ ID NO: 7572
  helical interface sequence

SEQ ID NO: 11210 - protein, 20 aa, Artificial
  helical interface sequence
EDESYARAYRIIRAHQTELT

SEQ ID NO: 11211 - protein, 14 aa, Artificial
  helical interface sequence
HPNRVLEHLHSTAF

SEQ ID NO: 11212 - protein, 18 aa, Artificial
  helical interface sequence
NEFTTHILEVINAHMVLS

SEQ ID NO: 11213 - protein, 8 aa, Artificial
  helical interface sequence
QYANNLAG

SEQ ID NO: 11214 - protein, 14 aa, Artificial
  helical interface sequence
MEGIHRWAIWMAVL

SEQ ID NO: 11215 - protein, 14 aa, Artificial
  helical interface sequence
QGTLFELILAANYL

SEQ ID NO: 11216 - protein, 5 aa, Artificial
  helical interface sequence
LKEFV

SEQ ID NO: 11217 - protein, 8 aa, Artificial
  helical interface sequence
PITKAKIN

SEQ ID NO: 11218 - protein, 15 aa, Artificial
  helical interface sequence
QQNMKDGLQNCKATY

SEQ ID NO: 11219 - protein, 10 aa, Artificial
  helical interface sequence
KTTLLHMLKN

SEQ ID NO: 11220 - protein, 10 aa, Artificial
  helical interface sequence
DIFREIASSM

SEQ ID NO: 11221 - protein, 13 aa, Artificial
  helical interface sequence
KEQKLRFAFRIYD

SEQ ID NO: 11222 - protein, 8 aa, Artificial
  helical interface sequence
ARRTRAIG

SEQ ID NO: 11223 - protein, 12 aa, Artificial
  helical interface sequence
KSARLAVEGLWQ

SEQ ID NO: 11224 - protein, 8 aa, Artificial
  helical interface sequence
YYLDREAG

SEQ ID NO: 11225 - protein, 13 aa, Artificial
  helical interface sequence
PLNAFDGALLNAG

SEQ ID NO: 11226 - protein, 20 aa, Artificial
  helical interface sequence
YLWIEAKLEEKVAVLKARAF

SEQ ID NO: 11227 - protein, 39 aa, Artificial
  helical interface sequence
TATQARCRGFLMRVEYRAMVERRESIFCIQYNVRSFMNV

SEQ ID NO: 11228 - protein, 11 aa, Artificial
  helical interface sequence
IANVARIMKNA

SEQ ID NO: 11229 - protein, 13 aa, Artificial
  helical interface sequence
NSVWNQRHFVISN

SEQ ID NO: 11230 - protein, 17 aa, Artificial
  helical interface sequence
PYLIAFLVDIYEDMLEN

SEQ ID NO: 11231 - protein, 13 aa, Artificial
  helical interface sequence
NSVWNQRHFVISN

SEQ ID NO: 11232 - protein, 13 aa, Artificial
  helical interface sequence
KPLLDAGCKVVAE

SEQ ID NO: 11233 - protein, 19 aa, Artificial
  helical interface sequence
VPTAQLWGAVGAVGLVWAT

SEQ ID NO: 11234 - protein, 30 aa, Artificial; identical to SEQ ID NO: 2910
  helical interface sequence

SEQ ID NO: 11235 - protein, 30 aa, Artificial; identical to SEQ ID NO: 2910
  helical interface sequence

SEQ ID NO: 11236 - protein, 13 aa, Artificial
  helical interface sequence
ISWVSTWDDRRAE

SEQ ID NO: 11237 - protein, 14 aa, Artificial
  helical interface sequence
AWELRKGMNTLVGY

SEQ ID NO: 11238 - protein, 10 aa, Artificial
  helical interface sequence
ARTWRFLTFG

SEQ ID NO: 11239 - protein, 13 aa, Artificial
  helical interface sequence
ISWVSTWDDRRAE

SEQ ID NO: 11240 - protein, 14 aa, Artificial
  helical interface sequence
AWELRKGMNTLVGY

SEQ ID NO: 11241 - protein, 15 aa, Artificial
  helical interface sequence
LGEYSDVGNIIEQFA

SEQ ID NO: 11242 - protein, 12 aa, Artificial
  helical interface sequence
SHSKKMLKALLS

SEQ ID NO: 11243 - protein, 14 aa, Artificial
  helical interface sequence
CASSRQIISHWKNC

SEQ ID NO: 11244 - protein, 22 aa, Artificial
  helical interface sequence
VGDAQVLVRYMKAELELYRLQR

SEQ ID NO: 11245 - protein, 22 aa, Artificial
  helical interface sequence
VGDAQVLVRYMKAELELYRLQR

SEQ ID NO: 11246 - protein, 13 aa, Artificial
  helical interface sequence
AYQSFEQVVNELF

SEQ ID NO: 11247 - protein, 25 aa, Artificial
  helical interface sequence
PFHGLSIAFLYGSALLFAMHGATIL

SEQ ID NO: 11248 - protein, 18 aa, Artificial
  helical interface sequence
WSMYSRLRKMLYLIYVAG

SEQ ID NO: 11249 - protein, 23 aa, Artificial
  helical interface sequence
AGIAIELVRLFAVELEHYEKIEG

SEQ ID NO: 11250 - protein, 14 aa, Artificial
  helical interface sequence
MQQLLKDLLTAYKF

SEQ ID NO: 11251 - protein, 9 aa, Artificial
  helical interface sequence
RPLWRHYFQ

SEQ ID NO: 11252 - protein, 6 aa, Artificial
  helical interface sequence
WTDGLT

SEQ ID NO: 11253 - protein, 6 aa, Artificial
  helical interface sequence
WTDGLT

SEQ ID NO: 11254 - protein, 34 aa, Artificial
  helical interface sequence
EKAIEHRLKRYIPPLTVMSSAFVGFLATIANFIG

SEQ ID NO: 11255 - protein, 7 aa, Artificial
  helical interface sequence
QESVADK

SEQ ID NO: 11256 - protein, 14 aa, Artificial
  helical interface sequence
LPLVKAIATNIKKH

SEQ ID NO: 11257 - protein, 30 aa, Artificial
  helical interface sequence
TEELFKTLDKINFSYILSLEEVFRDFARDY

SEQ ID NO: 11258 - protein, 15 aa, Artificial
  helical interface sequence
VERAGHLLCDKAQKN

SEQ ID NO: 11259 - protein, 18 aa, Artificial
  helical interface sequence
PSYIFEYLATVMYQRRSK

SEQ ID NO: 11260 - protein, 13 aa, Artificial
  helical interface sequence
VESLTQSVCDLAL

SEQ ID NO: 11261 - protein, 15 aa, Artificial
  helical interface sequence
TETAASVFKELCYEN

SEQ ID NO: 11262 - protein, 12 aa, Artificial
  helical interface sequence
SDQLFGMCESLY

SEQ ID NO: 11263 - protein, 20 aa, Artificial
  helical interface sequence
VARKQQLIRDVIDVTNKSIG

SEQ ID NO: 11264 - protein, 14 aa, Artificial
  helical interface sequence
ALSAGLLRVISEAT

SEQ ID NO: 11265 - protein, 9 aa, Artificial
  helical interface sequence
SRSLHFFLA

SEQ ID NO: 11266 - protein, 18 aa, Artificial
  helical interface sequence
AHAGLIVFWAGAMTLFEL

SEQ ID NO: 11267 - protein, 24 aa, Artificial
  helical interface sequence
NFGSLLGICLILQILTGLFLAMHY

SEQ ID NO: 11268 - protein, 35 aa, Artificial; identical to SEQ ID NO: 2150
  helical interface sequence

SEQ ID NO: 11269 - protein, 26 aa, Artificial
  helical interface sequence
SQNLAAVNKSLSDALQHLAQSDTYLS

SEQ ID NO: 11270 - protein, 7 aa, Artificial
  helical interface sequence
GEVFIRA

SEQ ID NO: 11271 - protein, 16 aa, Artificial
  helical interface sequence
INVVTCAAGILSNLTC

SEQ ID NO: 11272 - protein, 6 aa, Artificial
  helical interface sequence
HTARLV

SEQ ID NO: 11273 - protein, 6 aa, Artificial
  helical interface sequence
FKSMIY

SEQ ID NO: 11274 - protein, 16 aa, Artificial
  helical interface sequence
AGGLDALGHARRTIRR

SEQ ID NO: 11275 - protein, 33 aa, Artificial; identical to SEQ ID NO: 7149
  helical interface sequence

SEQ ID NO: 11276 - protein, 31 aa, Artificial; identical to SEQ ID NO: 5073
  helical interface sequence

SEQ ID NO: 11277 - protein, 5 aa, Artificial
  helical interface sequence
WSRLD

SEQ ID NO: 11278 - protein, 14 aa, Artificial
  helical interface sequence
LVPSYAEKEAKISR

SEQ ID NO: 11279 - protein, 12 aa, Artificial
  helical interface sequence
SIYVYKVLKQVH

SEQ ID NO: 11280 - protein, 34 aa, Artificial; identical to SEQ ID NO: 1665
  helical interface sequence

SEQ ID NO: 11281 - protein, 24 aa, Artificial
  helical interface sequence
TAPVSAVQAAVSNLVRVGKETVQT

SEQ ID NO: 11282 - protein, 24 aa, Artificial
  helical interface sequence
KIMKVIRKNIVKKLIEAFNEIAED

SEQ ID NO: 11283 - protein, 19 aa, Artificial
  helical interface sequence
DIGEMYFMPPLMEALAQRA

SEQ ID NO: 11284 - protein, 14 aa, Artificial
  helical interface sequence
DEQIAAQVDYIVAN

SEQ ID NO: 11285 - protein, 14 aa, Artificial
  helical interface sequence
AKNYGRAVYECLRG

SEQ ID NO: 11286 - protein, 19 aa, Artificial
  helical interface sequence
PSNFKILSHCILVVVAKMF

SEQ ID NO: 11287 - protein, 28 aa, Artificial
  helical interface sequence
DTWAKIHFAIMFVGVNMTFFPQHFLGLS

SEQ ID NO: 11288 - protein, 33 aa, Artificial; identical to SEQ ID NO: 7876
  helical interface sequence

SEQ ID NO: 11289 - protein, 8 aa, Artificial
  helical interface sequence
SSLDIVLH

SEQ ID NO: 11290 - protein, 23 aa, Artificial
  helical interface sequence
PWPLTGALSALLMTSGLTMWFHF

SEQ ID NO: 11291 - protein, 22 aa, Artificial
  helical interface sequence
LAFGTVTGVALGALYPLVKYFI

SEQ ID NO: 11292 - protein, 10 aa, Artificial
  helical interface sequence
YAAYQQYKRP

SEQ ID NO: 11293 - protein, 8 aa, Artificial
  helical interface sequence
HWKNQFDH

SEQ ID NO: 11294 - protein, 19 aa, Artificial
  helical interface sequence
PDEVVSLVNQGLQEGERDF

SEQ ID NO: 11295 - protein, 8 aa, Artificial
  helical interface sequence
FTRWCQLG

SEQ ID NO: 11296 - protein, 6 aa, Artificial
  helical interface sequence
ESDLYK

SEQ ID NO: 11297 - protein, 19 aa, Artificial
  helical interface sequence
ETLIEPLKELEKAYKRFKD

SEQ ID NO: 11298 - protein, 7 aa, Artificial
  helical interface sequence
SEQLTSG

SEQ ID NO: 11299 - protein, 16 aa, Artificial
  helical interface sequence
YEQDDGENWVEVQRGL

SEQ ID NO: 11300 - protein, 25 aa, Artificial
  helical interface sequence
IGKLRSELEMVSGNVRVMSEMLTEL

SEQ ID NO: 11301 - protein, 5 aa, Artificial
  helical interface sequence
GEFLT

SEQ ID NO: 11302 - protein, 10 aa, Artificial
  helical interface sequence
KLHEEAARLF

SEQ ID NO: 11303 - protein, 15 aa, Artificial
  helical interface sequence
SLEKQKGVTNLLIKY

SEQ ID NO: 11304 - protein, 13 aa, Artificial
  helical interface sequence
SAEFIKNLSSIRR

SEQ ID NO: 11305 - protein, 12 aa, Artificial
  helical interface sequence
IHDIEHLANAFS

SEQ ID NO: 11306 - protein, 7 aa, Artificial
  helical interface sequence
ALLRYLL

SEQ ID NO: 11307 - protein, 19 aa, Artificial
  helical interface sequence
PLLLQESQDAVRQVAAAQG

SEQ ID NO: 11308 - protein, 8 aa, Artificial
  helical interface sequence
PFEVAQLG

SEQ ID NO: 11309 - protein, 23 aa, Artificial
  helical interface sequence
VGDAQVLVRYMKAELELYRLQRR

SEQ ID NO: 11310 - protein, 23 aa, Artificial
  helical interface sequence
VADARVLVDFARISAQQEKVTYG

SEQ ID NO: 11311 - protein, 7 aa, Artificial
  helical interface sequence
KKWIQKV

SEQ ID NO: 11312 - protein, 25 aa, Artificial
  helical interface sequence
KVTKRLHTLEEVNNNVRLLSEMLLH

SEQ ID NO: 11313 - protein, 19 aa, Artificial
  helical interface sequence
PLLQGRLFSYTDTQISRLG

SEQ ID NO: 11314 - protein, 25 aa, Artificial
  helical interface sequence
GATVCVLGLLLGEWINRYFNFWGWT

SEQ ID NO: 11315 - protein, 16 aa, Artificial
  helical interface sequence
MLERAKVKDEWAKAYG

SEQ ID NO: 11316 - protein, 22 aa, Artificial
  helical interface sequence
AQGALANIAVDKANLEIMTKRS

SEQ ID NO: 11317 - protein, 12 aa, Artificial
  helical interface sequence
RKSEIEYYAMLA

SEQ ID NO: 11318 - protein, 35 aa, Artificial; identical to SEQ ID NO: 5251
  helical interface sequence

SEQ ID NO: 11319 - protein, 16 aa, Artificial
  helical interface sequence
LSLALYVFDEYLQKTV

SEQ ID NO: 11320 - protein, 14 aa, Artificial
  helical interface sequence
GPDYRVLVDKSRKV

SEQ ID NO: 11321 - protein, 5 aa, Artificial
  helical interface sequence
MEMYQ

SEQ ID NO: 11322 - protein, 13 aa, Artificial
  helical interface sequence
VSELAELVKKLED

SEQ ID NO: 11323 - protein, 13 aa, Artificial
  helical interface sequence
AVDTYCRHNYGVG

SEQ ID NO: 11324 - protein, 12 aa, Artificial
  helical interface sequence
LNYYNKLFSETA

SEQ ID NO: 11325 - protein, 14 aa, Artificial
  helical interface sequence
KEDALKLVQLKQTG

SEQ ID NO: 11326 - protein, 6 aa, Artificial
  helical interface sequence
CEDIAR

SEQ ID NO: 11327 - protein, 15 aa, Artificial
  helical interface sequence
EELTPLILATQKQFN

SEQ ID NO: 11328 - protein, 11 aa, Artificial
  helical interface sequence
LEDQITLIQYS

SEQ ID NO: 11329 - protein, 11 aa, Artificial
  helical interface sequence
PEGFEQASAIM

SEQ ID NO: 11330 - protein, 21 aa, Artificial
  helical interface sequence
KRAKVTSAMQTMLFTMLRKLD

SEQ ID NO: 11331 - protein, 20 aa, Artificial
  helical interface sequence
SKMSDVKCTSVVLLSVLQQL

SEQ ID NO: 11332 - protein, 17 aa, Artificial
  helical interface sequence
APYRKEQRLREVLSGLG

SEQ ID NO: 11333 - protein, 24 aa, Artificial
  helical interface sequence
ETLKITVYIVVTFFVLLFVFGFLS

SEQ ID NO: 11334 - protein, 18 aa, Artificial
  helical interface sequence
GLIVFWAGAMTLFELAHF

SEQ ID NO: 11335 - protein, 20 aa, Artificial
  helical interface sequence
LLFPCAYLALGGWLTGTTFV

SEQ ID NO: 11336 - protein, 14 aa, Artificial
  helical interface sequence
YLALGGWLTGTTFV

SEQ ID NO: 11337 - protein, 6 aa, Artificial
  helical interface sequence
ESDLYK

SEQ ID NO: 11338 - protein, 30 aa, Artificial; identical to SEQ ID NO: 4916
  helical interface sequence

SEQ ID NO: 11339 - protein, 19 aa, Artificial
  helical interface sequence
PEDILVDIKRDYVLSKLRD

SEQ ID NO: 11340 - protein, 13 aa, Artificial
  helical interface sequence
QKEIDRLNEVAKN

SEQ ID NO: 11341 - protein, 25 aa, Artificial
  helical interface sequence
NRRMAACLRDMEIVLRYVSYAEIAG

SEQ ID NO: 11342 - protein, 9 aa, Artificial
  helical interface sequence
SDAYGAADA

SEQ ID NO: 11343 - protein, 17 aa, Artificial
  helical interface sequence
NSEVHMLLEHRKQQNES

SEQ ID NO: 11344 - protein, 8 aa, Artificial
  helical interface sequence
GYHVGWTH

SEQ ID NO: 11345 - protein, 19 aa, Artificial
  helical interface sequence
PEYQQDLDRELFKLKQMYG

SEQ ID NO: 11346 - protein, 11 aa, Artificial
  helical interface sequence
ADALRRELANY

SEQ ID NO: 11347 - protein, 7 aa, Artificial
  helical interface sequence
VAAALRR

SEQ ID NO: 11348 - protein, 5 aa, Artificial
  helical interface sequence
PVSIA

SEQ ID NO: 11349 - protein, 29 aa, Artificial
  helical interface sequence
SDYRYVAAALAVMRNVTQQINERKRRLEN

SEQ ID NO: 11350 - protein, 10 aa, Artificial
  helical interface sequence
YEEFVQMMTA

SEQ ID NO: 11351 - protein, 6 aa, Artificial
  helical interface sequence
RDCLIG

SEQ ID NO: 11352 - protein, 10 aa, Artificial
  helical interface sequence
AVPRAILELA

SEQ ID NO: 11353 - protein, 7 aa, Artificial
  helical interface sequence
LKVSIHQ

SEQ ID NO: 11354 - protein, 8 aa, Artificial
  helical interface sequence
LIRELHRA

SEQ ID NO: 11355 - protein, 16 aa, Artificial
  helical interface sequence
LCLQRLQEERKKWRKD

SEQ ID NO: 11356 - protein, 7 aa, Artificial
  helical interface sequence
GEKVSGT

SEQ ID NO: 11357 - protein, 12 aa, Artificial
  helical interface sequence
SHEVVAWIKKIL

SEQ ID NO: 11358 - protein, 12 aa, Artificial
  helical interface sequence
SHEVVAWIKKIL

SEQ ID NO: 11359 - protein, 29 aa, Artificial
  helical interface sequence
DGLNQLYNLVAQDYALTDTIEALSRMLHR

SEQ ID NO: 11360 - protein, 28 aa, Artificial
  helical interface sequence
SGIKSLYVRLRNLTVILWAIYPFIWLLG

SEQ ID NO: 11361 - protein, 17 aa, Artificial
  helical interface sequence
PEQLQAWRWEREIDERN

SEQ ID NO: 11362 - protein, 9 aa, Artificial
  helical interface sequence
RRVIEQTIN

SEQ ID NO: 11363 - protein, 26 aa, Artificial
  helical interface sequence
AASLHWTSERAVSALLLGLLPAAYLY

SEQ ID NO: 11364 - protein, 26 aa, Artificial
  helical interface sequence
AASLHWTSERAVSALLLGLLPAAYLY

SEQ ID NO: 11365 - protein, 11 aa, Artificial
  helical interface sequence
AEFKEAFSLFD

SEQ ID NO: 11366 - protein, 29 aa, Artificial
  helical interface sequence
AEVDLIATAHYLEALRVQVKAARAMAIFG

SEQ ID NO: 11367 - protein, 29 aa, Artificial
  helical interface sequence
AEVDLIATAHYLEALRVQVKAARAMAIFG

SEQ ID NO: 11368 - protein, 9 aa, Artificial
  helical interface sequence
GCSESVLRT

SEQ ID NO: 11369 - protein, 9 aa, Artificial
  helical interface sequence
GCSESVLRT

SEQ ID NO: 11370 - protein, 29 aa, Artificial
  helical interface sequence
AEVDLIATAHYLEALRVQVKAARAMAIFG

SEQ ID NO: 11371 - protein, 29 aa, Artificial
  helical interface sequence
AEVDLIATAHYLEALRVQVKAARAMAIFG

SEQ ID NO: 11372 - protein, 29 aa, Artificial
  helical interface sequence
AEVDLIATAHYLEALRVQVKAARAMAIFG

SEQ ID NO: 11373 - protein, 5 aa, Artificial
  helical interface sequence
EEFGR

SEQ ID NO: 11374 - protein, 31 aa, Artificial; identical to SEQ ID NO: 4418
  helical interface sequence

SEQ ID NO: 11375 - protein, 13 aa, Artificial
  helical interface sequence
PEALIYAVMQLQK

SEQ ID NO: 11376 - protein, 28 aa, Artificial
  helical interface sequence
LMARKQAGFTAVMFLTVLSVLLYLTNKR

SEQ ID NO: 11377 - protein, 28 aa, Artificial
  helical interface sequence
LMARKQAGFTAVMFLTVLSVLLYLTNKR

SEQ ID NO: 11378 - protein, 6 aa, Artificial
  helical interface sequence
TLESDD

SEQ ID NO: 11379 - protein, 12 aa, Artificial
  helical interface sequence
YDFILEKIKKTG

SEQ ID NO: 11380 - protein, 16 aa, Artificial
  helical interface sequence
VKFLAITTDCLQILAY

SEQ ID NO: 11381 - protein, 24 aa, Artificial
  helical interface sequence
AFLIIRLDRIIEKLRTKLDEAEKI

SEQ ID NO: 11382 - protein, 10 aa, Artificial
  helical interface sequence
RSERKKWIHC

SEQ ID NO: 11383 - protein, 15 aa, Artificial
  helical interface sequence
MDKINNRFNYLFEVN

SEQ ID NO: 11384 - protein, 14 aa, Artificial
  helical interface sequence
EEQKQEIYEAFSLF

SEQ ID NO: 11385 - protein, 6 aa, Artificial
  helical interface sequence
SEQLTS

SEQ ID NO: 11386 - protein, 13 aa, Artificial
  helical interface sequence
YPRALWWACETAT

SEQ ID NO: 11387 - protein, 5 aa, Artificial
  helical interface sequence
SSLHY

SEQ ID NO: 11388 - protein, 15 aa, Artificial
  helical interface sequence
ESVLNVIAADVTLVG

SEQ ID NO: 11389 - protein, 11 aa, Artificial
  helical interface sequence
PRHLQLAIRND

SEQ ID NO: 11390 - protein, 6 aa, Artificial
  helical interface sequence
VLRSIL

SEQ ID NO: 11391 - protein, 15 aa, Artificial
  helical interface sequence
KIQKLESDVSAQMEY

SEQ ID NO: 11392 - protein, 5 aa, Artificial
  helical interface sequence
SILEN

SEQ ID NO: 11393 - protein, 12 aa, Artificial
  helical interface sequence
EAELQDMINEVD

SEQ ID NO: 11394 - protein, 5 aa, Artificial
  helical interface sequence
GVYQL

SEQ ID NO: 11395 - protein, 9 aa, Artificial
  helical interface sequence
SLESCLKFA

SEQ ID NO: 11396 - protein, 11 aa, Artificial
  helical interface sequence
EELYQAVENLC

SEQ ID NO: 11397 - protein, 12 aa, Artificial
  helical interface sequence
EDTFKQIYAQFF

SEQ ID NO: 11398 - protein, 14 aa, Artificial
  helical interface sequence
DKVLRDLMMLSDRY

SEQ ID NO: 11399 - protein, 5 aa, Artificial
  helical interface sequence
EEFGR

SEQ ID NO: 11400 - protein, 9 aa, Artificial
  helical interface sequence
KDLLEQRRA

SEQ ID NO: 11401 - protein, 17 aa, Artificial
  helical interface sequence
AQGALANIAVDKANLEI

SEQ ID NO: 11402 - protein, 17 aa, Artificial
  helical interface sequence
AQGALANIAVDKANLEI

SEQ ID NO: 11403 - protein, 32 aa, Artificial
  helical interface sequence
EETQKQLLRLLVPLRHVELGANMNNAKIAGDA

SEQ ID NO: 11404 - protein, 7 aa, Artificial
  helical interface sequence
PVHQIYQ

SEQ ID NO: 11405 - protein, 25 aa, Artificial
  helical interface sequence
MDAYWKYQAEKEKKLYAIFDAFAQN

SEQ ID NO: 11406 - protein, 17 aa, Artificial
  helical interface sequence
IEYLAKQIVDNAIQQAK

SEQ ID NO: 11407 - protein, 13 aa, Artificial
  helical interface sequence
LHRVAAHELGHSL

SEQ ID NO: 11408 - protein, 10 aa, Artificial
  helical interface sequence
KTTILYKLKL

SEQ ID NO: 11409 - protein, 10 aa, Artificial
  helical interface sequence
KTTILYKLKL

SEQ ID NO: 11410 - protein, 8 aa, Artificial
  helical interface sequence
WYLWCVKH

SEQ ID NO: 11411 - protein, 24 aa, Artificial
  helical interface sequence
LHDQVHLLECAWLEILMIGLVWRS

SEQ ID NO: 11412 - protein, 8 aa, Artificial
  helical interface sequence
WYVWGQNH

SEQ ID NO: 11413 - protein, 15 aa, Artificial
  helical interface sequence
LSKQAVAYRQMSLLL

SEQ ID NO: 11414 - protein, 15 aa, Artificial
  helical interface sequence
LSKQAVAYRQMSLLL

SEQ ID NO: 11415 - protein, 12 aa, Artificial
  helical interface sequence
VFYLHSRLLERA

SEQ ID NO: 11416 - protein, 28 aa, Artificial
  helical interface sequence
GLWQIITICATGAFVSWALREVEICRKL

SEQ ID NO: 11417 - protein, 7 aa, Artificial
  helical interface sequence
ELEQIAD

SEQ ID NO: 11418 - protein, 12 aa, Artificial
  helical interface sequence
ERRIKDLVKRHS

SEQ ID NO: 11419 - protein, 18 aa, Artificial
  helical interface sequence
PEVQYVALRNINLIVQKR

SEQ ID NO: 11420 - protein, 9 aa, Artificial
  helical interface sequence
FVLIYELLD

SEQ ID NO: 11421 - protein, 14 aa, Artificial
  helical interface sequence
IYVKLEKLDIMIRL

SEQ ID NO: 11422 - protein, 18 aa, Artificial
  helical interface sequence
TQVQLTLLTAIVKLFLKK

SEQ ID NO: 11423 - protein, 22 aa, Artificial
  helical interface sequence
PQFALTNIAVLKHNLNIVIKRS

SEQ ID NO: 11424 - protein, 14 aa, Artificial
  helical interface sequence
ANVRFNVAKSLQKI

SEQ ID NO: 11425 - protein, 29 aa, Artificial
  helical interface sequence
SSAVMALQEASEAYLVGLFEDTNLCAIHA

SEQ ID NO: 11426 - protein, 11 aa, Artificial
  helical interface sequence
TQYLMKILKVA

SEQ ID NO: 11427 - protein, 11 aa, Artificial
  helical interface sequence
STTMRRLIDTY

SEQ ID NO: 11428 - protein, 11 aa, Artificial
  helical interface sequence
STTMRRLIDTY

SEQ ID NO: 11429 - protein, 19 aa, Artificial
  helical interface sequence
NYSIIDKLGKIVDDLVLCM

SEQ ID NO: 11430 - protein, 15 aa, Artificial
  helical interface sequence
EEQIAEFKEAFSLFD

SEQ ID NO: 11431 - protein, 10 aa, Artificial
  helical interface sequence
YADYMEAFKT

SEQ ID NO: 11432 - protein, 9 aa, Artificial
  helical interface sequence
NVEELLRRI

SEQ ID NO: 11433 - protein, 14 aa, Artificial
  helical interface sequence
AFLQKIEALVKDMQ

SEQ ID NO: 11434 - protein, 8 aa, Artificial
  helical interface sequence
FDCFRMWF

SEQ ID NO: 11435 - protein, 17 aa, Artificial
  helical interface sequence
QPEATKCFQWQRNMRRV

SEQ ID NO: 11436 - protein, 13 aa, Artificial
  helical interface sequence
TLGNLIAGTLRRI

SEQ ID NO: 11437 - protein, 11 aa, Artificial
  helical interface sequence
IGHSIQTWLLG

SEQ ID NO: 11438 - protein, 11 aa, Artificial
  helical interface sequence
IGHSIQTWLLG

SEQ ID NO: 11439 - protein, 29 aa, Artificial
  helical interface sequence
GFMLRYLHANGASLFFIAVYLHIFRGLYY

SEQ ID NO: 11440 - protein, 13 aa, Artificial
  helical interface sequence
WFVQALCSILEEH

SEQ ID NO: 11441 - protein, 12 aa, Artificial
  helical interface sequence
PQIHRANMLAQG

SEQ ID NO: 11442 - protein, 10 aa, Artificial
  helical interface sequence
QLANRLQMEL

SEQ ID NO: 11443 - protein, 6 aa, Artificial
  helical interface sequence
HHDIDS

SEQ ID NO: 11444 - protein, 10 aa, Artificial
  helical interface sequence
IQARRLWKDY

SEQ ID NO: 11445 - protein, 17 aa, Artificial
  helical interface sequence
EETEQINKHFHNTLEHL

SEQ ID NO: 11446 - protein, 7 aa, Artificial
  helical interface sequence
PWTQRFF

SEQ ID NO: 11447 - protein, 18 aa, Artificial
  helical interface sequence
LSSSISQLKRIQRDFKGL

SEQ ID NO: 11448 - protein, 13 aa, Artificial
  helical interface sequence
PIEYQRRESQTNS

SEQ ID NO: 11449 - protein, 11 aa, Artificial
  helical interface sequence
ETAFQGMLRKL

SEQ ID NO: 11450 - protein, 22 aa, Artificial
  helical interface sequence
AQGALANIAVDKANLEIMTKRS

SEQ ID NO: 11451 - protein, 13 aa, Artificial
  helical interface sequence
VAQIDALSQMVAE

SEQ ID NO: 11452 - protein, 13 aa, Artificial
  helical interface sequence
VAQIDALSQMVAE

SEQ ID NO: 11453 - protein, 8 aa, Artificial
  helical interface sequence
QEDVEAVS

SEQ ID NO: 11454 - protein, 15 aa, Artificial
  helical interface sequence
FATINEVYKQFFDEH

SEQ ID NO: 11455 - protein, 9 aa, Artificial
  helical interface sequence
IEAEVVNRC

SEQ ID NO: 11456 - protein, 10 aa, Artificial
  helical interface sequence
IPQSRELIAQ

SEQ ID NO: 11457 - protein, 12 aa, Artificial
  helical interface sequence
RWFLDKLVDEIG

SEQ ID NO: 11458 - protein, 31 aa, Artificial
  helical interface sequence
TEFINKFLEFSNRVYEALYYVHSLLYSSMTS

SEQ ID NO: 11459 - protein, 31 aa, Artificial; identical to SEQ ID NO: 11458
  helical interface sequence

SEQ ID NO: 11460 - protein, 19 aa, Artificial
  helical interface sequence
YSIREEIVLKVAILAEKYA

SEQ ID NO: 11461 - protein, 6 aa, Artificial
  helical interface sequence
QYAYRD

SEQ ID NO: 11462 - protein, 25 aa, Artificial
  helical interface sequence
NRRMAACLRDMEIILRYVSYALLAG

SEQ ID NO: 11463 - protein, 17 aa, Artificial
  helical interface sequence
EPFAEITAAIYDAISKG

SEQ ID NO: 11464 - protein, 5 aa, Artificial
  helical interface sequence
SEQLT

SEQ ID NO: 11465 - protein, 12 aa, Artificial
  helical interface sequence
EPLIATAVKFLQ

SEQ ID NO: 11466 - protein, 13 aa, Artificial
  helical interface sequence
KDILEQARAAVDT

SEQ ID NO: 11467 - protein, 11 aa, Artificial
  helical interface sequence
LARAHRAIHRL

SEQ ID NO: 11468 - protein, 12 aa, Artificial
  helical interface sequence
QENARLGRAIAR

SEQ ID NO: 11469 - protein, 20 aa, Artificial
  helical interface sequence
ASIHDTVENLIILANNSLSS

SEQ ID NO: 11470 - protein, 15 aa, Artificial
  helical interface sequence
INSAARNIQHLLYGK

SEQ ID NO: 11471 - protein, 12 aa, Artificial
  helical interface sequence
SDQLFGMCESLY

SEQ ID NO: 11472 - protein, 15 aa, Artificial
  helical interface sequence
PETFTQLVSSSLYER

SEQ ID NO: 11473 - protein, 13 aa, Artificial
  helical interface sequence
FQVEYSLEAIKLG

SEQ ID NO: 11474 - protein, 15 aa, Artificial
  helical interface sequence
INSAARNIQHLLYGK

SEQ ID NO: 11475 - protein, 22 aa, Artificial
  helical interface sequence
AADTEAVTQLIGSNIELHSLYT

SEQ ID NO: 11476 - protein, 9 aa, Artificial
  helical interface sequence
TITYVFIFA

SEQ ID NO: 11477 - protein, 5 aa, Artificial
  helical interface sequence
LYKAL

SEQ ID NO: 11478 - protein, 8 aa, Artificial
  helical interface sequence
GFIATALF

SEQ ID NO: 11479 - protein, 62 aa, Artificial; identical to SEQ ID NO: 1240
  helical interface sequence

SEQ ID NO: 11480 - protein, 7 aa, Artificial
  helical interface sequence
KQVKSVA

SEQ ID NO: 11481 - protein, 10 aa, Artificial
  helical interface sequence
LLAYLRRKLG

SEQ ID NO: 11482 - protein, 27 aa, Artificial
  helical interface sequence
VETQVAELIGTNAIAPFLLTMSFAQRQ

SEQ ID NO: 11483 - protein, 22 aa, Artificial
  helical interface sequence
RKEYEKIEEILDIGLAKAMEET

SEQ ID NO: 11484 - protein, 15 aa, Artificial
  helical interface sequence
EEQIAEFKEAFSLFD

SEQ ID NO: 11485 - protein, 25 aa, Artificial
  helical interface sequence
DPLVDVLPVIPVLFLALAFVWQAAV

SEQ ID NO: 11486 - protein, 22 aa, Artificial
  helical interface sequence
VGDAQVLVRYMKAELELYRLQR

SEQ ID NO: 11487 - protein, 23 aa, Artificial
  helical interface sequence
VADARVLVDFARISAQQEKVTYG

SEQ ID NO: 11488 - protein, 23 aa, Artificial
  helical interface sequence
VADARVLVDFARISAQQEKVTYG

SEQ ID NO: 11489 - protein, 10 aa, Artificial
  helical interface sequence
QLSMRMLSSC

SEQ ID NO: 11490 - protein, 18 aa, Artificial
  helical interface sequence
GGLINKKCYEMASHLRRS

SEQ ID NO: 11491 - protein, 5 aa, Artificial
  helical interface sequence
GTWHM

SEQ ID NO: 11492 - protein, 5 aa, Artificial
  helical interface sequence
GTWHM

SEQ ID NO: 11493 - protein, 15 aa, Artificial
  helical interface sequence
ELVNKISENCFEKCL

SEQ ID NO: 11494 - protein, 52 aa, Artificial
  helical interface sequence
VQVDQLRMQGQSVEAALRMERQAASEEKRKLAQLQVAYHQLFQEYDNHIKSS

SEQ ID NO: 11495 - protein, 5 aa, Artificial
  helical interface sequence
RASYL

SEQ ID NO: 11496 - protein, 15 aa, Artificial
  helical interface sequence
PEFRVQFQDMCATIG

SEQ ID NO: 11497 - protein, 12 aa, Artificial
  helical interface sequence
VKKNLEFGMRMK

SEQ ID NO: 11498 - protein, 5 aa, Artificial
  helical interface sequence
RELRE

SEQ ID NO: 11499 - protein, 15 aa, Artificial
  helical interface sequence
VKEVMHYLGQYIMMK

SEQ ID NO: 11500 - protein, 12 aa, Artificial
  helical interface sequence
GERRLRIAQTLT

SEQ ID NO: 11501 - protein, 13 aa, Artificial
  helical interface sequence
TAAMEKLKAYFAT

SEQ ID NO: 11502 - protein, 13 aa, Artificial
  helical interface sequence
AITAVINASDVQG

SEQ ID NO: 11503 - protein, 16 aa, Artificial
  helical interface sequence
NKRTALNSALLFLRRN

SEQ ID NO: 11504 - protein, 16 aa, Artificial
  helical interface sequence
YMQEVVPFLARLSNRL

SEQ ID NO: 11505 - protein, 19 aa, Artificial
  helical interface sequence
PEVHASLDKFVLAVGTVLT

SEQ ID NO: 11506 - protein, 20 aa, Artificial
  helical interface sequence
PENFRLLGDILVIILAAHFG

SEQ ID NO: 11507 - protein, 19 aa, Artificial
  helical interface sequence
PAMHASLDKFLASVSTVLT

SEQ ID NO: 11508 - protein, 6 aa, Artificial
  helical interface sequence
EREKEM

SEQ ID NO: 11509 - protein, 10 aa, Artificial
  helical interface sequence
VTDFTRSILT

SEQ ID NO: 11510 - protein, 8 aa, Artificial
  helical interface sequence
YEEFVQMM

SEQ ID NO: 11511 - protein, 16 aa, Artificial
  helical interface sequence
DHMERFWQQSLFKYLR

SEQ ID NO: 11512 - protein, 8 aa, Artificial
  helical interface sequence
KFMQFLMG

SEQ ID NO: 11513 - protein, 15 aa, Artificial
  helical interface sequence
SRNQHEIIRCLKAFM

SEQ ID NO: 11514 - protein, 19 aa, Artificial
  helical interface sequence
PSSFENVKEKWVPEITHHC

SEQ ID NO: 11515 - protein, 10 aa, Artificial
  helical interface sequence
TNEVAEMLRD

SEQ ID NO: 11516 - protein, 7 aa, Artificial
  helical interface sequence
KQVKSVA

SEQ ID NO: 11517 - protein, 9 aa, Artificial
  helical interface sequence
RPILQGFRT

SEQ ID NO: 11518 - protein, 7 aa, Artificial
  helical interface sequence
KQVKSVA

SEQ ID NO: 11519 - protein, 16 aa, Artificial
  helical interface sequence
AQVPLGAGIALACKYN

SEQ ID NO: 11520 - protein, 6 aa, Artificial
  helical interface sequence
KILEDN

SEQ ID NO: 11521 - protein, 6 aa, Artificial
  helical interface sequence
KILEDN

SEQ ID NO: 11522 - protein, 12 aa, Artificial
  helical interface sequence
VKDIIFAIKKTL

SEQ ID NO: 11523 - protein, 15 aa, Artificial
  helical interface sequence
MDSRLQRIHAEIKNS

SEQ ID NO: 11524 - protein, 13 aa, Artificial
  helical interface sequence
RLPALRSIGLKCL

SEQ ID NO: 11525 - protein, 7 aa, Artificial
  helical interface sequence
DKDFRVF

SEQ ID NO: 11526 - protein, 11 aa, Artificial
  helical interface sequence
VAENMSFGLKL

SEQ ID NO: 11527 - protein, 15 aa, Artificial
  helical interface sequence
LSKQAVAYRQLSLLL

SEQ ID NO: 11528 - protein, 5 aa, Artificial
  helical interface sequence
EVFTG

SEQ ID NO: 11529 - protein, 6 aa, Artificial
  helical interface sequence
AELFYK

SEQ ID NO: 11530 - protein, 22 aa, Artificial
  helical interface sequence
KESTQKAIDGVTNKVNSIIDKM

SEQ ID NO: 11531 - protein, 23 aa, Artificial
  helical interface sequence
LQEASDVLDDQIESFTKIIQNHY

SEQ ID NO: 11532 - protein, 19 aa, Artificial
  helical interface sequence
IISPVKDCILTVAKAVSFN

SEQ ID NO: 11533 - protein, 6 aa, Artificial
  helical interface sequence
SEELQA

SEQ ID NO: 11534 - protein, 18 aa, Artificial
  helical interface sequence
KVYIGKLNMILVQILKQE

SEQ ID NO: 11535 - protein, 21 aa, Artificial
  helical interface sequence
PSRLQAILGDVCHIREQLMSV

SEQ ID NO: 11536 - protein, 17 aa, Artificial
  helical interface sequence
RELLITDLLLRIEHYLQ

SEQ ID NO: 11537 - protein, 7 aa, Artificial
  helical interface sequence
RALQISM

SEQ ID NO: 11538 - protein, 13 aa, Artificial
  helical interface sequence
LAMANSLRRVMIA

SEQ ID NO: 11539 - protein, 6 aa, Artificial
  helical interface sequence
SEELQA

SEQ ID NO: 11540 - protein, 5 aa, Artificial
  helical interface sequence
MPMHG

SEQ ID NO: 11541 - protein, 11 aa, Artificial
  helical interface sequence
EEAIAEAKEIM

SEQ ID NO: 11542 - protein, 11 aa, Artificial
  helical interface sequence
EETRAELSQLC

SEQ ID NO: 11543 - protein, 14 aa, Artificial
  helical interface sequence
LAMANSLRRVMIAE

SEQ ID NO: 11544 - protein, 10 aa, Artificial
  helical interface sequence
EKELFESYIE

SEQ ID NO: 11545 - protein, 11 aa, Artificial
  helical interface sequence
AMDVVYALKRQ

SEQ ID NO: 11546 - protein, 9 aa, Artificial
  helical interface sequence
PRHLQLAVR

SEQ ID NO: 11547 - protein, 7 aa, Artificial
  helical interface sequence
GDILMRF

SEQ ID NO: 11548 - protein, 14 aa, Artificial
  helical interface sequence
GEKRLRIAQILTDN

SEQ ID NO: 11549 - protein, 14 aa, Artificial
  helical interface sequence
ERSWFREAEIYQTV

SEQ ID NO: 11550 - protein, 20 aa, Artificial
  helical interface sequence
YLEPYLKEVIRERKEREEWA

SEQ ID NO: 11551 - protein, 11 aa, Artificial
  helical interface sequence
ECVLCFENRKR

SEQ ID NO: 11552 - protein, 5 aa, Artificial
  helical interface sequence
SEQLT

SEQ ID NO: 11553 - protein, 7 aa, Artificial
  helical interface sequence
YFAEVEQ

SEQ ID NO: 11554 - protein, 18 aa, Artificial
  helical interface sequence
PLAMQRLKEAAEKAKIEL

SEQ ID NO: 11555 - protein, 29 aa, Artificial
  helical interface sequence
PEANLVCTAHYLQALRAQVEVAKGMAVFG

SEQ ID NO: 11556 - protein, 13 aa, Artificial
  helical interface sequence
IFIVLNMIRETYD

SEQ ID NO: 11557 - protein, 7 aa, Artificial
  helical interface sequence
MLGEILN

SEQ ID NO: 11558 - protein, 13 aa, Artificial
  helical interface sequence
EVDLLEEELGHLT

SEQ ID NO: 11559 - protein, 16 aa, Artificial
  helical interface sequence
AVEQLVCEIAAERWRS

SEQ ID NO: 11560 - protein, 12 aa, Artificial
  helical interface sequence
PLRALYLIATNG

SEQ ID NO: 11561 - protein, 29 aa, Artificial
  helical interface sequence
SSAVMALQEASEAYLVALFEDTNLCAIHA

SEQ ID NO: 11562 - protein, 11 aa, Artificial
  helical interface sequence
LKRIASMAGRQ

SEQ ID NO: 11563 - protein, 13 aa, Artificial
  helical interface sequence
NTQIDALLAIVSE

SEQ ID NO: 11564 - protein, 18 aa, Artificial
  helical interface sequence
PSYIFEYLATVMYQRRSK

SEQ ID NO: 11565 - protein, 23 aa, Artificial
  helical interface sequence
APDARVLSNYLRQQCNYSSLVFN

SEQ ID NO: 11566 - protein, 17 aa, Artificial
  helical interface sequence
PSYIFEYLATVMYQRRS

SEQ ID NO: 11567 - protein, 10 aa, Artificial
  helical interface sequence
QVEYALESIS

SEQ ID NO: 11568 - protein, 21 aa, Artificial
  helical interface sequence
AADGDALVKRFKNSVKWYHFD

SEQ ID NO: 11569 - protein, 12 aa, Artificial
  helical interface sequence
EIDQLFRIFRTL

SEQ ID NO: 11570 - protein, 8 aa, Artificial
  helical interface sequence
PEEIRKTF

SEQ ID NO: 11571 - protein, 8 aa, Artificial
  helical interface sequence
PEEIRKTF

SEQ ID NO: 11572 - protein, 7 aa, Artificial
  helical interface sequence
LIQVMAE

SEQ ID NO: 11573 - protein, 20 aa, Artificial
  helical interface sequence
YLWIEAKLEEKVAVLKARAF

SEQ ID NO: 11574 - protein, 28 aa, Artificial
  helical interface sequence
SDYNRTVMRNWTGKWLEPTIAALRDFMG

SEQ ID NO: 11575 - protein, 21 aa, Artificial
  helical interface sequence
AADGDALVKRFKNSVKWYHFD

SEQ ID NO: 11576 - protein, 22 aa, Artificial
  helical interface sequence
IPDGRHLVNRGREEAASFKKLY

SEQ ID NO: 11577 - protein, 17 aa, Artificial
  helical interface sequence
PQAVSSFVRQELAKSIR

SEQ ID NO: 11578 - protein, 18 aa, Artificial
  helical interface sequence
PEDLFETISQALLNAADR

SEQ ID NO: 11579 - protein, 17 aa, Artificial
  helical interface sequence
DAAVEANSYLDYAINAL

SEQ ID NO: 11580 - protein, 14 aa, Artificial
  helical interface sequence
LKETVKKILMEKYE

SEQ ID NO: 11581 - protein, 11 aa, Artificial
  helical interface sequence
EKTAVKIADIL

SEQ ID NO: 11582 - protein, 20 aa, Artificial
  helical interface sequence
LELIKYLNNVVEQLKDWLYK

SEQ ID NO: 11583 - protein, 19 aa, Artificial
  helical interface sequence
PANFKILNHCILVVISTMF

SEQ ID NO: 11584 - protein, 19 aa, Artificial
  helical interface sequence
PANFKILNHCILVVISTMF

SEQ ID NO: 11585 - protein, 13 aa, Artificial
  helical interface sequence
NSLANVLSQHLNQ

SEQ ID NO: 11586 - protein, 9 aa, Artificial
  helical interface sequence
DRLRPLSYP

SEQ ID NO: 11587 - protein, 20 aa, Artificial
  helical interface sequence
DSQKKAIERMKDTLRITYLT

SEQ ID NO: 11588 - protein, 19 aa, Artificial
  helical interface sequence
PVNFKFLGHCFLVVVAIHH

SEQ ID NO: 11589 - protein, 16 aa, Artificial
  helical interface sequence
AEEYGAETLERMFTAY

SEQ ID NO: 11590 - protein, 18 aa, Artificial
  helical interface sequence
AEVHASLDKFLCAVGTVL

SEQ ID NO: 11591 - protein, 11 aa, Artificial
  helical interface sequence
EETRAELSQLC

SEQ ID NO: 11592 - protein, 10 aa, Artificial
  helical interface sequence
VPNWHRDLVR

SEQ ID NO: 11593 - protein, 29 aa, Artificial
  helical interface sequence
QKSMSILNSFVNDIFERIATEASKLAAYN

SEQ ID NO: 11594 - protein, 16 aa, Artificial
  helical interface sequence
FLESVIRDSVTYTEHA

SEQ ID NO: 11595 - protein, 14 aa, Artificial
  helical interface sequence
AKNYGRAVYECLRG

SEQ ID NO: 11596 - protein, 21 aa, Artificial
  helical interface sequence
NAPGAAANRVALEACTQARNE

SEQ ID NO: 11597 - protein, 23 aa, Artificial
  helical interface sequence
AADTQAVADAVTYQLGFHSIELN

SEQ ID NO: 11598 - protein, 22 aa, Artificial
  helical interface sequence
ATDVQTVAQRLKFRLNLYELKE

SEQ ID NO: 11599 - protein, 23 aa, Artificial
  helical interface sequence
AADTQAVADAVTYQLGFHSIELN

SEQ ID NO: 11600 - protein, 17 aa, Artificial
  helical interface sequence
FGVTLGNPLRRILLSSI

SEQ ID NO: 11601 - protein, 11 aa, Artificial
  helical interface sequence
VVEIILNLKEL

SEQ ID NO: 11602 - protein, 5 aa, Artificial
  helical interface sequence
WTDLL

SEQ ID NO: 11603 - protein, 19 aa, Artificial
  helical interface sequence
ARYAPFNALALLVGSQCGR

SEQ ID NO: 11604 - protein, 16 aa, Artificial
  helical interface sequence
LETYRQIGKNAARYAR

SEQ ID NO: 11605 - protein, 12 aa, Artificial
  helical interface sequence
IEKNLSDLIDLV

SEQ ID NO: 11606 - protein, 21 aa, Artificial
  helical interface sequence
LRINKRILALCMGNHELYMRR

SEQ ID NO: 11607 - protein, 21 aa, Artificial
  helical interface sequence
EREKKKKILAERRKVLAIDHL

SEQ ID NO: 11608 - protein, 12 aa, Artificial
  helical interface sequence
EEELSDLFRMFD

SEQ ID NO: 11609 - protein, 7 aa, Artificial
  helical interface sequence
FKDYGHD

SEQ ID NO: 11610 - protein, 7 aa, Artificial
  helical interface sequence
FKDYGHD

SEQ ID NO: 11611 - protein, 12 aa, Artificial
  helical interface sequence
FQVEYAVKAVEN

SEQ ID NO: 11612 - protein, 15 aa, Artificial
  helical interface sequence
IPAFADRLGQYVQAH

SEQ ID NO: 11613 - protein, 12 aa, Artificial
  helical interface sequence
YQVEYALESISH

SEQ ID NO: 11614 - protein, 12 aa, Artificial
  helical interface sequence
FQVEYALEAIKQ

SEQ ID NO: 11615 - protein, 9 aa, Artificial
  helical interface sequence
FLQMLKMYF

SEQ ID NO: 11616 - protein, 9 aa, Artificial
  helical interface sequence
VEKIRYALG

SEQ ID NO: 11617 - protein, 15 aa, Artificial
  helical interface sequence
DDDRRTLVKYLADKQ

SEQ ID NO: 11618 - protein, 6 aa, Artificial
  helical interface sequence
SEELET

SEQ ID NO: 11619 - protein, 14 aa, Artificial
  helical interface sequence
DITEPAICALRHLT

SEQ ID NO: 11620 - protein, 20 aa, Artificial
  helical interface sequence
APARLHWLATLLMDALKRHH

SEQ ID NO: 11621 - protein, 9 aa, Artificial
  helical interface sequence
PVQQAMIDH

SEQ ID NO: 11622 - protein, 6 aa, Artificial
  helical interface sequence
YRCLSR

SEQ ID NO: 11623 - protein, 26 aa, Artificial
  helical interface sequence
TLGIHRLGLLLSLSAVFFSALCMIIT

SEQ ID NO: 11624 - protein, 26 aa, Artificial
  helical interface sequence
MEGIHRWAIWMAVLVTLTGGIGILLS

SEQ ID NO: 11625 - protein, 16 aa, Artificial
  helical interface sequence
WAKIRDEMGLAMEEGC

SEQ ID NO: 11626 - protein, 9 aa, Artificial
  helical interface sequence
EAIIRKALM

SEQ ID NO: 11627 - protein, 11 aa, Artificial
  helical interface sequence
LNDQVTLLKYG

SEQ ID NO: 11628 - protein, 21 aa, Artificial
  helical interface sequence
PHELTESVLPAARYDYAVAEQ

SEQ ID NO: 11629 - protein, 30 aa, Artificial; identical to SEQ ID NO: 7572
  helical interface sequence

SEQ ID NO: 11630 - protein, 17 aa, Artificial
  helical interface sequence
TSQMAKDVTTFLNWCAE

SEQ ID NO: 11631 - protein, 13 aa, Artificial
  helical interface sequence
LDSYLLKPVQRIT

SEQ ID NO: 11632 - protein, 30 aa, Artificial; identical to SEQ ID NO: 2587
  helical interface sequence

SEQ ID NO: 11633 - protein, 15 aa, Artificial
  helical interface sequence
KSPELLARYCDSLLK

SEQ ID NO: 11634 - protein, 7 aa, Artificial
  helical interface sequence
GKALLLL

SEQ ID NO: 11635 - protein, 22 aa, Artificial
  helical interface sequence
AQGALANIAVDKANLEIMTKRS

SEQ ID NO: 11636 - protein, 13 aa, Artificial
  helical interface sequence
FTFDLYRALASAA

SEQ ID NO: 11637 - protein, 13 aa, Artificial
  helical interface sequence
FTFDLYRALASAA

SEQ ID NO: 11638 - protein, 31 aa, Artificial; identical to SEQ ID NO: 10788
  helical interface sequence

SEQ ID NO: 11639 - protein, 6 aa, Artificial
  helical interface sequence
RLWKDY

SEQ ID NO: 11640 - protein, 9 aa, Artificial
  helical interface sequence
QAVLSLYAS

SEQ ID NO: 11641 - protein, 5 aa, Artificial
  helical interface sequence
VIQKG

SEQ ID NO: 11642 - protein, 14 aa, Artificial
  helical interface sequence
GCCSYHRTVLSRHF

SEQ ID NO: 11643 - protein, 14 aa, Artificial
  helical interface sequence
ANHYRWIVWKLAAM

SEQ ID NO: 11644 - protein, 19 aa, Artificial
  helical interface sequence
PERVLLQLKYRYDVEIDNS

SEQ ID NO: 11645 - protein, 13 aa, Artificial
  helical interface sequence
PLNAFDGALLNAG

SEQ ID NO: 11646 - protein, 33 aa, Artificial
  helical interface sequence
SDYNRTVMRNWTGKWLEPTIAALRDFMGLFAKL

SEQ ID NO: 11647 - protein, 33 aa, Artificial; identical to SEQ ID NO: 11646
  helical interface sequence

SEQ ID NO: 11648 - protein, 11 aa, Artificial
  helical interface sequence
PEMAAVILKAL

SEQ ID NO: 11649 - protein, 8 aa, Artificial
  helical interface sequence
ARRTRTIG

SEQ ID NO: 11650 - protein, 9 aa, Artificial
  helical interface sequence
QAVLSLYAS

SEQ ID NO: 11651 - protein, 13 aa, Artificial
  helical interface sequence
NSVWNQRHFVISN

SEQ ID NO: 11652 - protein, 8 aa, Artificial
  helical interface sequence
EAEIRFGI

SEQ ID NO: 11653 - protein, 14 aa, Artificial
  helical interface sequence
SSIRYLQEIYNSNN

SEQ ID NO: 11654 - protein, 9 aa, Artificial
  helical interface sequence
RPWLCYWIL

SEQ ID NO: 11655 - protein, 17 aa, Artificial
  helical interface sequence
VQELCRVLLDNVENKMK

SEQ ID NO: 11656 - protein, 8 aa, Artificial
  helical interface sequence
QNWNKIIR

SEQ ID NO: 11657 - protein, 15 aa, Artificial
  helical interface sequence
LKNVFDEAILAALEP

SEQ ID NO: 11658 - protein, 15 aa, Artificial
  helical interface sequence
EEASKLKERIWIGLN

SEQ ID NO: 11659 - protein, 5 aa, Artificial
  helical interface sequence
EELNA

SEQ ID NO: 11660 - protein, 23 aa, Artificial
  helical interface sequence
THNEMEKNRRAHLRLSLEKLKGL

SEQ ID NO: 11661 - protein, 10 aa, Artificial
  helical interface sequence
YKSTVKSLRQ

SEQ ID NO: 11662 - protein, 24 aa, Artificial
  helical interface sequence
DWYLKGRLTSLESQFINALGILET

SEQ ID NO: 11663 - protein, 9 aa, Artificial
  helical interface sequence
QAVLSLYAS

SEQ ID NO: 11664 - protein, 9 aa, Artificial
  helical interface sequence
QAVLSLYAS

SEQ ID NO: 11665 - protein, 13 aa, Artificial
  helical interface sequence
SREEILKAFRLFD

SEQ ID NO: 11666 - protein, 16 aa, Artificial
  helical interface sequence
ADVVGAEALGRMLTAY

SEQ ID NO: 11667 - protein, 10 aa, Artificial
  helical interface sequence
RELDELMASL

SEQ ID NO: 11668 - protein, 11 aa, Artificial
  helical interface sequence
EEEQIAYAMQM

SEQ ID NO: 11669 - protein, 18 aa, Artificial
  helical interface sequence
KQIRYILDGISALRKETC

SEQ ID NO: 11670 - protein, 6 aa, Artificial
  helical interface sequence
ISKVAD

SEQ ID NO: 11671 - protein, 22 aa, Artificial
  helical interface sequence
VGDAQVLVRYMKAELELYRLQR

SEQ ID NO: 11672 - protein, 5 aa, Artificial
  helical interface sequence
EIAKL

SEQ ID NO: 11673 - protein, 7 aa, Artificial
  helical interface sequence
FTDYLRG

SEQ ID NO: 11674 - protein, 13 aa, Artificial
  helical interface sequence
AQSRVMEEMLLKA

SEQ ID NO: 11675 - protein, 6 aa, Artificial
  helical interface sequence
APLDRV

SEQ ID NO: 11676 - protein, 24 aa, Artificial
  helical interface sequence
AAERDRAYLEGECVEWLRRYLKNG

SEQ ID NO: 11677 - protein, 14 aa, Artificial
  helical interface sequence
EVGGEALGRLLVVY

SEQ ID NO: 11678 - protein, 17 aa, Artificial
  helical interface sequence
DSVLFYAITTLHNLLLH

SEQ ID NO: 11679 - protein, 9 aa, Artificial
  helical interface sequence
KLMYTRLLK

SEQ ID NO: 11680 - protein, 14 aa, Artificial
  helical interface sequence
EHVVDTCRKFIKAS

SEQ ID NO: 11681 - protein, 7 aa, Artificial
  helical interface sequence
QFLYTTG

SEQ ID NO: 11682 - protein, 23 aa, Artificial
  helical interface sequence
AQGALANIAVDKANLDVMKERSN

SEQ ID NO: 11683 - protein, 14 aa, Artificial
  helical interface sequence
AKNYGRAVYECLRG

SEQ ID NO: 11684 - protein, 14 aa, Artificial
  helical interface sequence
AKNYGRAVYECLRG

SEQ ID NO: 11685 - protein, 14 aa, Artificial
  helical interface sequence
AKNYGRAVYECLRG

SEQ ID NO: 11686 - protein, 14 aa, Artificial
  helical interface sequence
AKNYGRAVYECLRG

SEQ ID NO: 11687 - protein, 14 aa, Artificial
  helical interface sequence
AKNYGRAVYECLRG

SEQ ID NO: 11688 - protein, 14 aa, Artificial
  helical interface sequence
AKNYGRAVYECLRG

SEQ ID NO: 11689 - protein, 14 aa, Artificial
  helical interface sequence
AKNYGRAVYECLRG

SEQ ID NO: 11690 - protein, 14 aa, Artificial
  helical interface sequence
AKNYGRAVYECLRG

SEQ ID NO: 11691 - protein, 14 aa, Artificial
  helical interface sequence
AKNYGRAVYECLRG

SEQ ID NO: 11692 - protein, 9 aa, Artificial
  helical interface sequence
KLQAAFHEK

SEQ ID NO: 11693 - protein, 6 aa, Artificial
  helical interface sequence
HFCYEL

SEQ ID NO: 11694 - protein, 22 aa, Artificial
  helical interface sequence
TADARSMIEHARTAAVTHNLYY

SEQ ID NO: 11695 - protein, 22 aa, Artificial
  helical interface sequence
AADTEAVTQLIGSNIELHSLYT

SEQ ID NO: 11696 - protein, 12 aa, Artificial
  helical interface sequence
SDQLFGMCESLY

SEQ ID NO: 11697 - protein, 6 aa, Artificial
  helical interface sequence
SEELQA

SEQ ID NO: 11698 - protein, 21 aa, Artificial
  helical interface sequence
NINTERTLKTQAVNKLAEIMN

SEQ ID NO: 11699 - protein, 30 aa, Artificial
  helical interface sequence
TCDEKTQSLGVKFLDEYQSKVKRQIFSGYQ

SEQ ID NO: 11700 - protein, 20 aa, Artificial
  helical interface sequence
DSQKKAIERMKDTLRIAYLT

SEQ ID NO: 11701 - protein, 14 aa, Artificial
  helical interface sequence
PDRITELLDAKEAA

SEQ ID NO: 11702 - protein, 18 aa, Artificial
  helical interface sequence
PSRLKCVVEKFAVNHINR

SEQ ID NO: 11703 - protein, 29 aa, Artificial
  helical interface sequence
GWIIRYMHANGASMFFICLYMHVGRGLYY

SEQ ID NO: 11704 - protein, 17 aa, Artificial
  helical interface sequence
HTSIRRGFQVYKQVCSS

SEQ ID NO: 11705 - protein, 33 aa, Artificial; identical to SEQ ID NO: 3637
  helical interface sequence

SEQ ID NO: 11706 - protein, 19 aa, Artificial
  helical interface sequence
ESEVLRGKNLLRNALVSHL

SEQ ID NO: 11707 - protein, 8 aa, Artificial
  helical interface sequence
YAQALQSV

SEQ ID NO: 11708 - protein, 15 aa, Artificial
  helical interface sequence
TTTAFSSVTHICRDV

SEQ ID NO: 11709 - protein, 9 aa, Artificial
  helical interface sequence
PLHLAAYSG

SEQ ID NO: 11710 - protein, 8 aa, Artificial
  helical interface sequence
RDEVREVM

SEQ ID NO: 11711 - protein, 10 aa, Artificial
  helical interface sequence
QTGQMTAGFL

SEQ ID NO: 11712 - protein, 6 aa, Artificial
  helical interface sequence
RCAHNC

SEQ ID NO: 11713 - protein, 10 aa, Artificial
  helical interface sequence
PIVVACFDAI

SEQ ID NO: 11714 - protein, 24 aa, Artificial
  helical interface sequence
IDSQIQYWQLIRWENAIFFAAREH

SEQ ID NO: 11715 - protein, 5 aa, Artificial
  helical interface sequence
DGRLA

SEQ ID NO: 11716 - protein, 7 aa, Artificial
  helical interface sequence
LAELVND

SEQ ID NO: 11717 - protein, 5 aa, Artificial
  helical interface sequence
PEWMF

SEQ ID NO: 11718 - protein, 13 aa, Artificial
  helical interface sequence
GDWYAGINFAAVQ

SEQ ID NO: 11719 - protein, 61 aa, Artificial; identical to SEQ ID NO: 317
  helical interface sequence

SEQ ID NO: 11720 - protein, 15 aa, Artificial
  helical interface sequence
AKNYGRAVYECLRGG

SEQ ID NO: 11721 - protein, 15 aa, Artificial
  helical interface sequence
AKNYGRAVYECLRGG

SEQ ID NO: 11722 - protein, 21 aa, Artificial
  helical interface sequence
NAPGAAANRVALEACTQARNE

SEQ ID NO: 11723 - protein, 19 aa, Artificial
  helical interface sequence
PSNFKILSHCILVVVAKMF

SEQ ID NO: 11724 - protein, 25 aa, Artificial
  helical interface sequence
LLARRLRFHIVGAFMVSLGFATFYK

SEQ ID NO: 11725 - protein, 12 aa, Artificial
  helical interface sequence
ASQKALKEKEKA

SEQ ID NO: 11726 - protein, 28 aa, Artificial
  helical interface sequence
EWKTVVGAAMFFIGFTALLLIWEKHYVY

SEQ ID NO: 11727 - protein, 7 aa, Artificial
  helical interface sequence
LIGEISS

SEQ ID NO: 11728 - protein, 14 aa, Artificial
  helical interface sequence
KATKKRLAKLDNQN

SEQ ID NO: 11729 - protein, 19 aa, Artificial
  helical interface sequence
QGALRLMWELGEYLKALTG

SEQ ID NO: 11730 - protein, 11 aa, Artificial
  helical interface sequence
PEAVRRALAER

SEQ ID NO: 11731 - protein, 5 aa, Artificial
  helical interface sequence
GEFLT

SEQ ID NO: 11732 - protein, 5 aa, Artificial
  helical interface sequence
GEFLT

SEQ ID NO: 11733 - protein, 21 aa, Artificial
  helical interface sequence
RLPALRSIGLKCLEHLFFFKL

SEQ ID NO: 11734 - protein, 10 aa, Artificial
  helical interface sequence
YEEFVQMMTA

SEQ ID NO: 11735 - protein, 21 aa, Artificial
  helical interface sequence
REEIDQLQEEMALILNNHIME

SEQ ID NO: 11736 - protein, 23 aa, Artificial
  helical interface sequence
PAEVEALREKVYASLEAYCKHKY

SEQ ID NO: 11737 - protein, 7 aa, Artificial
  helical interface sequence
ALLRYLL

SEQ ID NO: 11738 - protein, 20 aa, Artificial
  helical interface sequence
PDNFKLLSDCLTIVVAAQLG

SEQ ID NO: 11739 - protein, 32 aa, Artificial; identical to SEQ ID NO: 5976
  helical interface sequence

SEQ ID NO: 11740 - protein, 10 aa, Artificial
  helical interface sequence
LDDQVILLRA

SEQ ID NO: 11741 - protein, 12 aa, Artificial
  helical interface sequence
NDAKELKRILTQ

SEQ ID NO: 11742 - protein, 19 aa, Artificial
  helical interface sequence
PAVHASLDKFLSSVSTVLT

SEQ ID NO: 11743 - protein, 23 aa, Artificial
  helical interface sequence
VADARVLVDFARISAQQEKVTYG

SEQ ID NO: 11744 - protein, 23 aa, Artificial
  helical interface sequence
VADARVLVDFARISAQQEKVTYG

SEQ ID NO: 11745 - protein, 7 aa, Artificial
  helical interface sequence
FFAENEQ

SEQ ID NO: 11746 - protein, 9 aa, Artificial
  helical interface sequence
DTFWDYVSL

SEQ ID NO: 11747 - protein, 12 aa, Artificial
  helical interface sequence
FILREKITHFDH

SEQ ID NO: 11748 - protein, 13 aa, Artificial
  helical interface sequence
FHRRELWEAIEAG

SEQ ID NO: 11749 - protein, 34 aa, Artificial; identical to SEQ ID NO: 1952
  helical interface sequence

SEQ ID NO: 11750 - protein, 16 aa, Artificial
  helical interface sequence
MLERAKVKDEWAKAYG

SEQ ID NO: 11751 - protein, 9 aa, Artificial
  helical interface sequence
AAVVLHRLM

SEQ ID NO: 11752 - protein, 16 aa, Artificial
  helical interface sequence
LSLALYVFDEYLQKTV

SEQ ID NO: 11753 - protein, 10 aa, Artificial
  helical interface sequence
PNDVITFLEH

SEQ ID NO: 11754 - protein, 17 aa, Artificial
  helical interface sequence
PSYIFEYLATVMYQRRS

SEQ ID NO: 11755 - protein, 12 aa, Artificial
  helical interface sequence
PKDIQLARRIRG

SEQ ID NO: 11756 - protein, 10 aa, Artificial
  helical interface sequence
VGRVHRLLRK

SEQ ID NO: 11757 - protein, 14 aa, Artificial
  helical interface sequence
AKEEMERFWNKNLG

SEQ ID NO: 11758 - protein, 14 aa, Artificial
  helical interface sequence
MATRQEINAACVAL

SEQ ID NO: 11759 - protein, 19 aa, Artificial
  helical interface sequence
PSNFKILNHCILVVISTMF

SEQ ID NO: 11760 - protein, 7 aa, Artificial
  helical interface sequence
SEQLTSG

SEQ ID NO: 11761 - protein, 6 aa, Artificial
  helical interface sequence
VVDEKL

SEQ ID NO: 11762 - protein, 18 aa, Artificial
  helical interface sequence
GLIVFWAGAMTLFELAHF

SEQ ID NO: 11763 - protein, 21 aa, Artificial
  helical interface sequence
DDHIQYFIYQTLRAVKVLHGS

SEQ ID NO: 11764 - protein, 20 aa, Artificial
  helical interface sequence
EKLFDELLDVSINCARKLRE

SEQ ID NO: 11765 - protein, 7 aa, Artificial
  helical interface sequence
FSFANRF

SEQ ID NO: 11766 - protein, 7 aa, Artificial
  helical interface sequence
FSFANRF

SEQ ID NO: 11767 - protein, 27 aa, Artificial
  helical interface sequence
NGELQSINGRYQRATASLEAARSLTSN

SEQ ID NO: 11768 - protein, 13 aa, Artificial
  helical interface sequence
STAIREISLLKEL

SEQ ID NO: 11769 - protein, 8 aa, Artificial
  helical interface sequence
EAEISHTQ

SEQ ID NO: 11770 - protein, 10 aa, Artificial
  helical interface sequence
LVDDFEKKFN

SEQ ID NO: 11771 - protein, 10 aa, Artificial
  helical interface sequence
LVDDFEKKFN

SEQ ID NO: 11772 - protein, 17 aa, Artificial
  helical interface sequence
VQKLFVDKIREYRTKRQ

SEQ ID NO: 11773 - protein, 7 aa, Artificial
  helical interface sequence
VAAALRR

SEQ ID NO: 11774 - protein, 13 aa, Artificial
  helical interface sequence
ATATQVGVDILKE

SEQ ID NO: 11775 - protein, 9 aa, Artificial
  helical interface sequence
AEERRRKQN

SEQ ID NO: 11776 - protein, 17 aa, Artificial
  helical interface sequence
LTELHNKIVEMRERVAS

SEQ ID NO: 11777 - protein, 7 aa, Artificial
  helical interface sequence
RAQYATD

SEQ ID NO: 11778 - protein, 5 aa, Artificial
  helical interface sequence
DWVTE

SEQ ID NO: 11779 - protein, 8 aa, Artificial
  helical interface sequence
INQLVRKG

SEQ ID NO: 11780 - protein, 20 aa, Artificial
  helical interface sequence
PAAMQLALDQRAALADRTLG

SEQ ID NO: 11781 - protein, 6 aa, Artificial
  helical interface sequence
CEDIAR

SEQ ID NO: 11782 - protein, 26 aa, Artificial
  helical interface sequence
GDIALKKKLEQNTKKLDEESSQLETT

SEQ ID NO: 11783 - protein, 12 aa, Artificial
  helical interface sequence
SIYVYKVLKQVH

SEQ ID NO: 11784 - protein, 14 aa, Artificial
  helical interface sequence
QSEAIARNLREMSR

SEQ ID NO: 11785 - protein, 11 aa, Artificial
  helical interface sequence
FPHYVAVVKSL

SEQ ID NO: 11786 - protein, 12 aa, Artificial
  helical interface sequence
STDIGSVASFLL

SEQ ID NO: 11787 - protein, 9 aa, Artificial
  helical interface sequence
GCSESVLRT

SEQ ID NO: 11788 - protein, 9 aa, Artificial
  helical interface sequence
GCSESVLRT

SEQ ID NO: 11789 - protein, 29 aa, Artificial
  helical interface sequence
AEVDLIATAHYLEALRVQVKAARAMAIFG

SEQ ID NO: 11790 - protein, 9 aa, Artificial
  helical interface sequence
GCSESVLRT

SEQ ID NO: 11791 - protein, 6 aa, Artificial
  helical interface sequence
DEQLKS

SEQ ID NO: 11792 - protein, 28 aa, Artificial
  helical interface sequence
LMARKQAGFTAVMFLTVLSVLLYLTNKR

SEQ ID NO: 11793 - protein, 11 aa, Artificial
  helical interface sequence
IGHSIQTWLLG

SEQ ID NO: 11794 - protein, 11 aa, Artificial
  helical interface sequence
IGHSIQTWLLG

SEQ ID NO: 11795 - protein, 6 aa, Artificial
  helical interface sequence
SEQLTS

SEQ ID NO: 11796 - protein, 11 aa, Artificial
  helical interface sequence
FKNLKRVAKEL

SEQ ID NO: 11797 - protein, 19 aa, Artificial
  helical interface sequence
HFAVTLEHFLESALDESFG

SEQ ID NO: 11798 - protein, 19 aa, Artificial
  helical interface sequence
HFAVTLEHFLESALDESFG

SEQ ID NO: 11799 - protein, 10 aa, Artificial
  helical interface sequence
AEAYTIYCQN

SEQ ID NO: 11800 - protein, 13 aa, Artificial
  helical interface sequence
KALAPLLLAFVTK

SEQ ID NO: 11801 - protein, 19 aa, Artificial
  helical interface sequence
DNYFDAFKTAILHVVAAQL

SEQ ID NO: 11802 - protein, 13 aa, Artificial
  helical interface sequence
PLDEIKRAFQLFD

SEQ ID NO: 11803 - protein, 29 aa, Artificial
  helical interface sequence
LHWRAAGAATVLLVIVLLAGSYLAVLAER

SEQ ID NO: 11804 - protein, 65 aa, Artificial; identical to SEQ ID NO: 7671
  helical interface sequence

SEQ ID NO: 11805 - protein, 15 aa, Artificial
  helical interface sequence
LSKQAVAYRQLSLLL

SEQ ID NO: 11806 - protein, 15 aa, Artificial
  helical interface sequence
TGSAARNGVLSAWLS

SEQ ID NO: 11807 - protein, 22 aa, Artificial
  helical interface sequence
PIDLIDDALMVGMGVVIRLYDE

SEQ ID NO: 11808 - protein, 22 aa, Artificial
  helical interface sequence
KDLLEQRRAAVDTYCRHNYGVG

SEQ ID NO: 11809 - protein, 21 aa, Artificial
  helical interface sequence
QGALANIAVDKANLEIMTKRS

SEQ ID NO: 11810 - protein, 7 aa, Artificial
  helical interface sequence
EEFGRFA

SEQ ID NO: 11811 - protein, 14 aa, Artificial
  helical interface sequence
HPNRVLEHLHSTAF

SEQ ID NO: 11812 - protein, 13 aa, Artificial
  helical interface sequence
HETRELTRMNLQT

SEQ ID NO: 11813 - protein, 10 aa, Artificial
  helical interface sequence
YGAYVGNRAK

SEQ ID NO: 11814 - protein, 25 aa, Artificial
  helical interface sequence
MDAYWKYQAEKEKKLYAIFDAFAQN

SEQ ID NO: 11815 - protein, 5 aa, Artificial
  helical interface sequence
ACNRQ

SEQ ID NO: 11816 - protein, 8 aa, Artificial
  helical interface sequence
LGTVMRSL

SEQ ID NO: 11817 - protein, 11 aa, Artificial
  helical interface sequence
TLNLRYTRVAL

SEQ ID NO: 11818 - protein, 13 aa, Artificial
  helical interface sequence
VDNVIDIICENAR

SEQ ID NO: 11819 - protein, 17 aa, Artificial
  helical interface sequence
DDEKQKLIEEVHAVVTV

SEQ ID NO: 11820 - protein, 12 aa, Artificial
  helical interface sequence
DQLSRRLAALRN

SEQ ID NO: 11821 - protein, 11 aa, Artificial
  helical interface sequence
PDLRSLFSRAG

SEQ ID NO: 11822 - protein, 11 aa, Artificial
  helical interface sequence
AKALKQHLQRY

SEQ ID NO: 11823 - protein, 11 aa, Artificial
  helical interface sequence
STTMRRLIDTY

SEQ ID NO: 11824 - protein, 11 aa, Artificial
  helical interface sequence
VREHIHAIEAC

SEQ ID NO: 11825 - protein, 32 aa, Artificial; identical to SEQ ID NO: 2168
  helical interface sequence

SEQ ID NO: 11826 - protein, 5 aa, Artificial
  helical interface sequence
SPKEV

SEQ ID NO: 11827 - protein, 29 aa, Artificial
  helical interface sequence
SSAVMALQEASEAYLVALFEDTNLCAIHA

SEQ ID NO: 11828 - protein, 21 aa, Artificial
  helical interface sequence
DEEMKAMLSYYYSTVMEQQVN

SEQ ID NO: 11829 - protein, 11 aa, Artificial
  helical interface sequence
FKNLKRVAKEL

SEQ ID NO: 11830 - protein, 15 aa, Artificial
  helical interface sequence
EENLEFWLACEEFKK

SEQ ID NO: 11831 - protein, 12 aa, Artificial
  helical interface sequence
APTLIYERYLSE

SEQ ID NO: 11832 - protein, 14 aa, Artificial
  helical interface sequence
ALVRSITCWTLSRY

SEQ ID NO: 11833 - protein, 19 aa, Artificial
  helical interface sequence
YLHRMTTLFCINVLSEVCG

SEQ ID NO: 11834 - protein, 17 aa, Artificial
  helical interface sequence
QPEATKCFQWQRNMRRV

SEQ ID NO: 11835 - protein, 38 aa, Artificial
  helical interface sequence
LQSKLDAKKAKLSKLEELSDKIDELDAEIAKLEDQLKA

SEQ ID NO: 11836 - protein, 17 aa, Artificial
  helical interface sequence
IEDLWDLLQYHVATYFD

SEQ ID NO: 11837 - protein, 19 aa, Artificial
  helical interface sequence
LSVTAVVIEGLARHKEELG

SEQ ID NO: 11838 - protein, 8 aa, Artificial
  helical interface sequence
KAEIANKQ

SEQ ID NO: 11839 - protein, 32 aa, Artificial; identical to SEQ ID NO: 462
  helical interface sequence

SEQ ID NO: 11840 - protein, 32 aa, Artificial; identical to SEQ ID NO: 462
  helical interface sequence

SEQ ID NO: 11841 - protein, 29 aa, Artificial
  helical interface sequence
RRDFLYYATAGAGAVATGAAVWPLINQMN

SEQ ID NO: 11842 - protein, 32 aa, Artificial; identical to SEQ ID NO: 462
  helical interface sequence

SEQ ID NO: 11843 - protein, 29 aa, Artificial
  helical interface sequence
GFMLRYLHANGASLFFIAVYLHIFRGLYY

SEQ ID NO: 11844 - protein, 11 aa, Artificial
  helical interface sequence
IGHSIQTWLLG

SEQ ID NO: 11845 - protein, 19 aa, Artificial
  helical interface sequence
EDENILRNAVNLQVLKFHY

SEQ ID NO: 11846 - protein, 20 aa, Artificial
  helical interface sequence
KKEAEKTVREMAKIGFEMRG

SEQ ID NO: 11847 - protein, 8 aa, Artificial
  helical interface sequence
ARFLLSKL

SEQ ID NO: 11848 - protein, 10 aa, Artificial
  helical interface sequence
SLALLQRQFD

SEQ ID NO: 11849 - protein, 19 aa, Artificial
  helical interface sequence
PTNFKILAHNLIVVIAAYF

SEQ ID NO: 11850 - protein, 10 aa, Artificial
  helical interface sequence
FLTAARIAKE

SEQ ID NO: 11851 - protein, 12 aa, Artificial
  helical interface sequence
SHEVVAWIKKIL

SEQ ID NO: 11852 - protein, 15 aa, Artificial
  helical interface sequence
LLPHLIEATAYNVAR

SEQ ID NO: 11853 - protein, 16 aa, Artificial
  helical interface sequence
VDEVGAEALGRLLVVY

SEQ ID NO: 11854 - protein, 25 aa, Artificial
  helical interface sequence
SDRMAACLRDMEIILRYVTYAVFAG

SEQ ID NO: 11855 - protein, 13 aa, Artificial
  helical interface sequence
VAQIDALSQMVAE

SEQ ID NO: 11856 - protein, 6 aa, Artificial
  helical interface sequence
GGFTNA

SEQ ID NO: 11857 - protein, 25 aa, Artificial
  helical interface sequence
LKDAEAVQKFFLEEIQLGEELLAQG

SEQ ID NO: 11858 - protein, 9 aa, Artificial
  helical interface sequence
VRAVAALEP

SEQ ID NO: 11859 - protein, 10 aa, Artificial
  helical interface sequence
HVATLACVNK

SEQ ID NO: 11860 - protein, 10 aa, Artificial
  helical interface sequence
IPQSRELIAQ

SEQ ID NO: 11861 - protein, 14 aa, Artificial
  helical interface sequence
PFKLDEVKIALVNA

SEQ ID NO: 11862 - protein, 14 aa, Artificial
  helical interface sequence
TREGNDLYHEMIES

SEQ ID NO: 11863 - protein, 11 aa, Artificial
  helical interface sequence
DKIRSILHRTH

SEQ ID NO: 11864 - protein, 16 aa, Artificial
  helical interface sequence
YEQFPELMNMLWSRML

SEQ ID NO: 11865 - protein, 13 aa, Artificial
  helical interface sequence
YFLQISRVNDLNR

SEQ ID NO: 11866 - protein, 6 aa, Artificial
  helical interface sequence
MKELAH

SEQ ID NO: 11867 - protein, 14 aa, Artificial
  helical interface sequence
GERRLRIAQTLTEA

SEQ ID NO: 11868 - protein, 8 aa, Artificial
  helical interface sequence
EAEISHTQ

SEQ ID NO: 11869 - protein, 13 aa, Artificial
  helical interface sequence
STDLAILKKYLLG

SEQ ID NO: 11870 - protein, 13 aa, Artificial
  helical interface sequence
TEMANKAAEAVLK

SEQ ID NO: 11871 - protein, 20 aa, Artificial
  helical interface sequence
PENFRLLGNVLVCVLAHHFG

SEQ ID NO: 11872 - protein, 8 aa, Artificial
  helical interface sequence
AMLLKDRL

SEQ ID NO: 11873 - protein, 16 aa, Artificial
  helical interface sequence
RTSQSGYMQRRLINAL

SEQ ID NO: 11874 - protein, 11 aa, Artificial
  helical interface sequence
PRKVRLVVDLI

SEQ ID NO: 11875 - protein, 21 aa, Artificial
  helical interface sequence
TYYKRTIKISGQKAMYALKSK

SEQ ID NO: 11876 - protein, 21 aa, Artificial
  helical interface sequence
TYYKRTIKISGQKAMYALKSK

SEQ ID NO: 11877 - protein, 22 aa, Artificial
  helical interface sequence
LAETRSVDIVTGADVLEYYAGL

SEQ ID NO: 11878 - protein, 18 aa, Artificial
  helical interface sequence
AMQRSRILRRAVDILRER

SEQ ID NO: 11879 - protein, 11 aa, Artificial
  helical interface sequence
LARAHRAIHRL

SEQ ID NO: 11880 - protein, 6 aa, Artificial
  helical interface sequence
PDEYEQ

SEQ ID NO: 11881 - protein, 13 aa, Artificial
  helical interface sequence
FQVEYALEAVKRG

SEQ ID NO: 11882 - protein, 14 aa, Artificial
  helical interface sequence
DPCHLARVVKIGSL

SEQ ID NO: 11883 - protein, 14 aa, Artificial
  helical interface sequence
DPCHLARVVKIGSL

SEQ ID NO: 11884 - protein, 11 aa, Artificial
  helical interface sequence
PALSRTIYQLY

SEQ ID NO: 11885 - protein, 10 aa, Artificial
  helical interface sequence
PEDLVNACKM

SEQ ID NO: 11886 - protein, 15 aa, Artificial
  helical interface sequence
GGEKKRNDILQMAVL

SEQ ID NO: 11887 - protein, 16 aa, Artificial
  helical interface sequence
WRVVGVWFAALGISTM

SEQ ID NO: 11888 - protein, 8 aa, Artificial
  helical interface sequence
KINLLGFL

SEQ ID NO: 11889 - protein, 11 aa, Artificial
  helical interface sequence
FHSTVINHYRM

SEQ ID NO: 11890 - protein, 17 aa, Artificial
  helical interface sequence
SQLIFNAQALKDRYEGN

SEQ ID NO: 11891 - protein, 9 aa, Artificial
  helical interface sequence
EHVVDTCRK

SEQ ID NO: 11892 - protein, 11 aa, Artificial
  helical interface sequence
EHVVDTCRKFI

SEQ ID NO: 11893 - protein, 24 aa, Artificial
  helical interface sequence
WSGILLFPCAYLALGGWLTGTTFV

SEQ ID NO: 11894 - protein, 29 aa, Artificial
  helical interface sequence
PSLKGFFIGLLSGAVVLGLTFAVLIAISQ

SEQ ID NO: 11895 - protein, 11 aa, Artificial
  helical interface sequence
AIEIGIISDAL

SEQ ID NO: 11896 - protein, 22 aa, Artificial
  helical interface sequence
AQELVMTLNELFARFDKLAAEN

SEQ ID NO: 11897 - protein, 29 aa, Artificial
  helical interface sequence
SSAVMALQEASEAYLVALFEDTNLCAIHA

SEQ ID NO: 11898 - protein, 23 aa, Artificial
  helical interface sequence
DEGLKIAAKHYQFASGAFLHIKE

SEQ ID NO: 11899 - protein, 18 aa, Artificial
  helical interface sequence
GATFAVSGLLIGEWINRY

SEQ ID NO: 11900 - protein, 8 aa, Artificial
  helical interface sequence
LPGLFDGG

SEQ ID NO: 11901 - protein, 5 aa, Artificial
  helical interface sequence
RASYL

SEQ ID NO: 11902 - protein, 14 aa, Artificial
  helical interface sequence
LIEGAYTASALLEA

SEQ ID NO: 11903 - protein, 21 aa, Artificial
  helical interface sequence
SNEYLILASTLHGVFAIASQL

SEQ ID NO: 11904 - protein, 11 aa, Artificial
  helical interface sequence
IRFKSYLLSMG

SEQ ID NO: 11905 - protein, 22 aa, Artificial
  helical interface sequence
MGSLLGLCLVIQIVTGIFMAMH

SEQ ID NO: 11906 - protein, 20 aa, Artificial
  helical interface sequence
EDESYARAYRIIRAHQTELT

SEQ ID NO: 11907 - protein, 17 aa, Artificial
  helical interface sequence
PFAEKMLIEAFLEMVEE

SEQ ID NO: 11908 - protein, 11 aa, Artificial
  helical interface sequence
DDYVHEFCRYG

SEQ ID NO: 11909 - protein, 22 aa, Artificial
  helical interface sequence
NYQVEEDIGKLKSCLTGFLQEY

SEQ ID NO: 11910 - protein, 11 aa, Artificial
  helical interface sequence
DDYVHEFCRYG

SEQ ID NO: 11911 - protein, 12 aa, Artificial
  helical interface sequence
VVTKSIVNADAE

SEQ ID NO: 11912 - protein, 5 aa, Artificial
  helical interface sequence
EYDIV

SEQ ID NO: 11913 - protein, 16 aa, Artificial
  helical interface sequence
IIFTFLALIVFRMGIY

SEQ ID NO: 11914 - protein, 19 aa, Artificial
  helical interface sequence
ITLVLSVLFFVSCVVTAFV

SEQ ID NO: 11915 - protein, 23 aa, Artificial
  helical interface sequence
LIYTPIFNEYISLVEKYIEEQLL

SEQ ID NO: 11916 - protein, 7 aa, Artificial
  helical interface sequence
VTDLISI

SEQ ID NO: 11917 - protein, 7 aa, Artificial
  helical interface sequence
VTDLISI

SEQ ID NO: 11918 - protein, 16 aa, Artificial
  helical interface sequence
AQYIQAAGVALGLKMR

SEQ ID NO: 11919 - protein, 9 aa, Artificial
  helical interface sequence
PSVRKYARE

SEQ ID NO: 11920 - protein, 31 aa, Artificial
  helical interface sequence
RLLLRFKILRSLQAFVAVAARVFAHGAATLS

SEQ ID NO: 11921 - protein, 12 aa, Artificial
  helical interface sequence
DEEVDEMIREAD

SEQ ID NO: 11922 - protein, 6 aa, Artificial
  helical interface sequence
PISEKY

SEQ ID NO: 11923 - protein, 9 aa, Artificial
  helical interface sequence
MFSHLRRIG

SEQ ID NO: 11924 - protein, 5 aa, Artificial
  helical interface sequence
DGYYI

SEQ ID NO: 11925 - protein, 13 aa, Artificial
  helical interface sequence
PPDVHVLKLIDEQ

SEQ ID NO: 11926 - protein, 15 aa, Artificial
  helical interface sequence
WFIQSLCAMLKQYAD

SEQ ID NO: 11927 - protein, 16 aa, Artificial
  helical interface sequence
TTRALHERFDRLERML

SEQ ID NO: 11928 - protein, 10 aa, Artificial
  helical interface sequence
LLAYLRRKLG

SEQ ID NO: 11929 - protein, 15 aa, Artificial
  helical interface sequence
KSVMEELKRIIDDSE

SEQ ID NO: 11930 - protein, 6 aa, Artificial
  helical interface sequence
KILEDN

SEQ ID NO: 11931 - protein, 12 aa, Artificial
  helical interface sequence
IEPAQEEHEKYH

SEQ ID NO: 11932 - protein, 10 aa, Artificial
  helical interface sequence
TEMITTLKKI

SEQ ID NO: 11933 - protein, 24 aa, Artificial
  helical interface sequence
LDDQVILLRAGWNELLIASFSHRS

SEQ ID NO: 11934 - protein, 9 aa, Artificial
  helical interface sequence
IQYVTYLLT

SEQ ID NO: 11935 - protein, 20 aa, Artificial
  helical interface sequence
QMAAVKQALREAGDEFELRY

SEQ ID NO: 11936 - protein, 15 aa, Artificial
  helical interface sequence
TREGNDLYREMKETG

SEQ ID NO: 11937 - protein, 7 aa, Artificial
  helical interface sequence
TSIEERT

SEQ ID NO: 11938 - protein, 6 aa, Artificial
  helical interface sequence
PWTQRF

SEQ ID NO: 11939 - protein, 11 aa, Artificial
  helical interface sequence
YHELKVAMKAL

SEQ ID NO: 11940 - protein, 16 aa, Artificial
  helical interface sequence
DSTRETVLKQIREFLE

SEQ ID NO: 11941 - protein, 16 aa, Artificial
  helical interface sequence
RETVLKQIREFLEEIV

SEQ ID NO: 11942 - protein, 14 aa, Artificial
  helical interface sequence
EEQKQEIYEAFSLF

SEQ ID NO: 11943 - protein, 8 aa, Artificial
  helical interface sequence
ERELWEKE

SEQ ID NO: 11944 - protein, 17 aa, Artificial
  helical interface sequence
FSSANNRDNTYNRVSED

SEQ ID NO: 11945 - protein, 14 aa, Artificial
  helical interface sequence
RTEYIRRRLAQDAQ

SEQ ID NO: 11946 - protein, 7 aa, Artificial
  helical interface sequence
PEYFIKG

SEQ ID NO: 11947 - protein, 10 aa, Artificial
  helical interface sequence
KEVFAQFRAN

SEQ ID NO: 11948 - protein, 10 aa, Artificial
  helical interface sequence
KEVFAQFRAN

SEQ ID NO: 11949 - protein, 6 aa, Artificial
  helical interface sequence
MERDCL

SEQ ID NO: 11950 - protein, 8 aa, Artificial
  helical interface sequence
ADEAKTLI

SEQ ID NO: 11951 - protein, 11 aa, Artificial
  helical interface sequence
ESTQLLMKYLG

SEQ ID NO: 11952 - protein, 22 aa, Artificial
  helical interface sequence
RSMVEGQIEGGVTMGQGFVLME

SEQ ID NO: 11953 - protein, 12 aa, Artificial
  helical interface sequence
PHYDRGEVAGML

SEQ ID NO: 11954 - protein, 15 aa, Artificial
  helical interface sequence
DEVGGEALGRLLVVY

SEQ ID NO: 11955 - protein, 11 aa, Artificial
  helical interface sequence
QAKIWDTIEKS

SEQ ID NO: 11956 - protein, 7 aa, Artificial
  helical interface sequence
KRSLARF

SEQ ID NO: 11957 - protein, 16 aa, Artificial
  helical interface sequence
AGEYGAEALERMFLSF

SEQ ID NO: 11958 - protein, 13 aa, Artificial
  helical interface sequence
RYISNRVRVSIQT

SEQ ID NO: 11959 - protein, 7 aa, Artificial
  helical interface sequence
TDEIVKD

SEQ ID NO: 11960 - protein, 7 aa, Artificial
  helical interface sequence
LQGRSGC

SEQ ID NO: 11961 - protein, 10 aa, Artificial
  helical interface sequence
AENRERFKAD

SEQ ID NO: 11962 - protein, 20 aa, Artificial
  helical interface sequence
ENLYDDRVFRIKRALDLSMR

SEQ ID NO: 11963 - protein, 20 aa, Artificial
  helical interface sequence
YLEPYLKEVIRERKEREEWA

SEQ ID NO: 11964 - protein, 11 aa, Artificial
  helical interface sequence
SFKITRGIEAV

SEQ ID NO: 11965 - protein, 13 aa, Artificial
  helical interface sequence
ELGRPDAEYWNSQ

SEQ ID NO: 11966 - protein, 14 aa, Artificial
  helical interface sequence
DEQITKQLEYCLNQ

SEQ ID NO: 11967 - protein, 9 aa, Artificial
  helical interface sequence
KNFLEASYD

SEQ ID NO: 11968 - protein, 12 aa, Artificial
  helical interface sequence
DEEVDEMIREAD

SEQ ID NO: 11969 - protein, 10 aa, Artificial
  helical interface sequence
YEEFVQMMTA

SEQ ID NO: 11970 - protein, 11 aa, Artificial
  helical interface sequence
PDMVWDFWSLR

SEQ ID NO: 11971 - protein, 19 aa, Artificial
  helical interface sequence
KMLQGRLFAYPDTHRHRLG

SEQ ID NO: 11972 - protein, 8 aa, Artificial
  helical interface sequence
KNFLEASY

SEQ ID NO: 11973 - protein, 9 aa, Artificial
  helical interface sequence
KNFLEASYD

SEQ ID NO: 11974 - protein, 19 aa, Artificial
  helical interface sequence
DFSARIARNTQLFLQQESG

SEQ ID NO: 11975 - protein, 18 aa, Artificial
  helical interface sequence
SRVLERYLLEAKEAEKIT

SEQ ID NO: 11976 - protein, 17 aa, Artificial
  helical interface sequence
PETAVLLASYAVQSKYG

SEQ ID NO: 11977 - protein, 15 aa, Artificial
  helical interface sequence
PLAVAKILAAVARAE

SEQ ID NO: 11978 - protein, 19 aa, Artificial
  helical interface sequence
YPESVALISAFIMEGARDG

SEQ ID NO: 11979 - protein, 12 aa, Artificial
  helical interface sequence
STDLICYILHIM

SEQ ID NO: 11980 - protein, 12 aa, Artificial
  helical interface sequence
TVALREIRRYQK

SEQ ID NO: 11981 - protein, 15 aa, Artificial
  helical interface sequence
QNIVKAVQYAARKLQ

SEQ ID NO: 11982 - protein, 10 aa, Artificial
  helical interface sequence
LNVQRKAIHE

SEQ ID NO: 11983 - protein, 19 aa, Artificial
  helical interface sequence
PAVHASLDKFFTAVSTVLT

SEQ ID NO: 11984 - protein, 23 aa, Artificial
  helical interface sequence
RLPALRSIGLKCLEHLFFFKLIG

SEQ ID NO: 11985 - protein, 10 aa, Artificial
  helical interface sequence
QVEYALESIS

SEQ ID NO: 11986 - protein, 13 aa, Artificial
  helical interface sequence
FQVEYALEAIKQG

SEQ ID NO: 11987 - protein, 13 aa, Artificial
  helical interface sequence
FQVEYAVKAVENG

SEQ ID NO: 11988 - protein, 16 aa, Artificial
  helical interface sequence
KGLLDVTCKTVANMIK

SEQ ID NO: 11989 - protein, 10 aa, Artificial
  helical interface sequence
DELLLGIFSC

SEQ ID NO: 11990 - protein, 19 aa, Artificial
  helical interface sequence
VQVAEEAIVNAMRVLYYRD

SEQ ID NO: 11991 - protein, 22 aa, Artificial
  helical interface sequence
TADARSMIEHARTAAVTHNLYY

SEQ ID NO: 11992 - protein, 19 aa, Artificial
  helical interface sequence
VQVAEEAIVNAMRVLYYRD

SEQ ID NO: 11993 - protein, 14 aa, Artificial
  helical interface sequence
YSGFYTFSLLDHHY

SEQ ID NO: 11994 - protein, 11 aa, Artificial
  helical interface sequence
LLKSAVELAKD

SEQ ID NO: 11995 - protein, 14 aa, Artificial
  helical interface sequence
PLRSLMTNLQNLNK

SEQ ID NO: 11996 - protein, 17 aa, Artificial
  helical interface sequence
DAAVEANSYLDYAINAL

SEQ ID NO: 11997 - protein, 6 aa, Artificial
  helical interface sequence
PGRTLG

SEQ ID NO: 11998 - protein, 6 aa, Artificial
  helical interface sequence
PGRTLG

SEQ ID NO: 11999 - protein, 20 aa, Artificial
  helical interface sequence
LELIKYLNNVVEQLKDWLYK

SEQ ID NO: 12000 - protein, 20 aa, Artificial
  helical interface sequence
LELIKYLNNVVEQLKDWLYK

SEQ ID NO: 12001 - protein, 12 aa, Artificial
  helical interface sequence
VSSTRRSLAALE

SEQ ID NO: 12002 - protein, 10 aa, Artificial
  helical interface sequence
LPVYRELIQA

SEQ ID NO: 12003 - protein, 19 aa, Artificial
  helical interface sequence
AETQGAFQKFLAVVVSALG

SEQ ID NO: 12004 - protein, 11 aa, Artificial
  helical interface sequence
KVAQNRRNFCN

SEQ ID NO: 12005 - protein, 9 aa, Artificial
  helical interface sequence
DRLRPLSYP

SEQ ID NO: 12006 - protein, 19 aa, Artificial
  helical interface sequence
EDEVSRAKNQLKSSLLMNL

SEQ ID NO: 12007 - protein, 19 aa, Artificial
  helical interface sequence
PENFRLLGDILIIVLAAHF

SEQ ID NO: 12008 - protein, 19 aa, Artificial
  helical interface sequence
PENFRLLGDILIIVLAAHF

SEQ ID NO: 12009 - protein, 19 aa, Artificial
  helical interface sequence
PENFRLLGDILIIVLAAHF

SEQ ID NO: 12010 - protein, 12 aa, Artificial
  helical interface sequence
KETWETWWTEYW

SEQ ID NO: 12011 - protein, 22 aa, Artificial
  helical interface sequence
KDLLEQRRAAVDTYCRHNYGVG

SEQ ID NO: 12012 - protein, 16 aa, Artificial
  helical interface sequence
VAHLIECLLSKVAALS

SEQ ID NO: 12013 - protein, 22 aa, Artificial
  helical interface sequence
EIIQNAQRDAVTLFCCLLRSRL

SEQ ID NO: 12014 - protein, 8 aa, Artificial
  helical interface sequence
HADYLLRT

SEQ ID NO: 12015 - protein, 6 aa, Artificial
  helical interface sequence
LVIEFY

SEQ ID NO: 12016 - protein, 22 aa, Artificial
  helical interface sequence
LERTRAELDTVCRHNYEKTETP

SEQ ID NO: 12017 - protein, 13 aa, Artificial
  helical interface sequence
ELGRPDAEYWNSQ

SEQ ID NO: 12018 - protein, 14 aa, Artificial
  helical interface sequence
AKNYGRAVYECLRG

SEQ ID NO: 12019 - protein, 14 aa, Artificial
  helical interface sequence
DEQIAAQVDYIVAN

SEQ ID NO: 12020 - protein, 14 aa, Artificial
  helical interface sequence
AKNYGRAVYECLRG

SEQ ID NO: 12021 - protein, 22 aa, Artificial
  helical interface sequence
ATDVQTVAQRLKFRLNLYELKE

SEQ ID NO: 12022 - protein, 19 aa, Artificial
  helical interface sequence
LDRAMRLVKDVFISAAERD

SEQ ID NO: 12023 - protein, 15 aa, Artificial
  helical interface sequence
VEYITRYIASLKQRY

SEQ ID NO: 12024 - protein, 16 aa, Artificial
  helical interface sequence
STSDPVRQYLHEIGQV

SEQ ID NO: 12025 - protein, 9 aa, Artificial
  helical interface sequence
LHFFLAAWR

SEQ ID NO: 12026 - protein, 7 aa, Artificial
  helical interface sequence
PYNAIAF

SEQ ID NO: 12027 - protein, 15 aa, Artificial
  helical interface sequence
ESKYEKLKYKRCKYL

SEQ ID NO: 12028 - protein, 10 aa, Artificial
  helical interface sequence
TRRIWYAIAM

SEQ ID NO: 12029 - protein, 22 aa, Artificial
  helical interface sequence
AADTQAIADIVQYHLELYTSQY

SEQ ID NO: 12030 - protein, 20 aa, Artificial
  helical interface sequence
ISDMQHIERLLKDLVTENAY

SEQ ID NO: 12031 - protein, 22 aa, Artificial
  helical interface sequence
TADARSMIEHARTAAVTHNLYY

SEQ ID NO: 12032 - protein, 22 aa, Artificial
  helical interface sequence
APDARVLSNYLRQQCNYSSLVF

SEQ ID NO: 12033 - protein, 12 aa, Artificial
  helical interface sequence
PKESEFLFNAIH

SEQ ID NO: 12034 - protein, 12 aa, Artificial
  helical interface sequence
MQSVVKLLDDQL

SEQ ID NO: 12035 - protein, 8 aa, Artificial
  helical interface sequence
PTLRFRLL

SEQ ID NO: 12036 - protein, 21 aa, Artificial
  helical interface sequence
PSRLQAILGDVCHIREQLMSV

SEQ ID NO: 12037 - protein, 8 aa, Artificial
  helical interface sequence
LLELLRAE

SEQ ID NO: 12038 - protein, 18 aa, Artificial
  helical interface sequence
AHAGEYGAEALERMFLSF

SEQ ID NO: 12039 - protein, 16 aa, Artificial
  helical interface sequence
PVNFKLLSHCLLVTLA

SEQ ID NO: 12040 - protein, 7 aa, Artificial
  helical interface sequence
YEHDLEV

SEQ ID NO: 12041 - protein, 7 aa, Artificial
  helical interface sequence
PAVFLRD

SEQ ID NO: 12042 - protein, 8 aa, Artificial
  helical interface sequence
PLLQEIYK

SEQ ID NO: 12043 - protein, 6 aa, Artificial
  helical interface sequence
YCSEVC

SEQ ID NO: 12044 - protein, 29 aa, Artificial
  helical interface sequence
FIGRVFLFLMIVLPLWCGLHRMHHAMHDL

SEQ ID NO: 12045 - protein, 7 aa, Artificial
  helical interface sequence
KEETQQK

SEQ ID NO: 12046 - protein, 11 aa, Artificial
  helical interface sequence
PFICELAKAYV

SEQ ID NO: 12047 - protein, 15 aa, Artificial
  helical interface sequence
SARADDARQLFVLAG

SEQ ID NO: 12048 - protein, 22 aa, Artificial
  helical interface sequence
KAVVYSNTIQSIIAIIRAMGRL

SEQ ID NO: 12049 - protein, 11 aa, Artificial
  helical interface sequence
AITSVINSSDV

SEQ ID NO: 12050 - protein, 10 aa, Artificial
  helical interface sequence
LAPLLLAFVT

SEQ ID NO: 12051 - protein, 21 aa, Artificial
  helical interface sequence
PHELTESVLPAARYDYAVAEQ

SEQ ID NO: 12052 - protein, 12 aa, Artificial
  helical interface sequence
ALKLVRESELLG

SEQ ID NO: 12053 - protein, 10 aa, Artificial
  helical interface sequence
DLLLEMLDAH

SEQ ID NO: 12054 - protein, 6 aa, Artificial
  helical interface sequence
DQINQD

SEQ ID NO: 12055 - protein, 8 aa, Artificial
  helical interface sequence
WYVWGQNH

SEQ ID NO: 12056 - protein, 15 aa, Artificial
  helical interface sequence
IFSHLDWTNNFSLVH

SEQ ID NO: 12057 - protein, 7 aa, Artificial
  helical interface sequence
ELEQIAD

SEQ ID NO: 12058 - protein, 11 aa, Artificial
  helical interface sequence
EEIREAFRVFD

SEQ ID NO: 12059 - protein, 13 aa, Artificial
  helical interface sequence
NHAIVQTLVHFIN

SEQ ID NO: 12060 - protein, 9 aa, Artificial
  helical interface sequence
QAVLSLYAS

SEQ ID NO: 12061 - protein, 7 aa, Artificial
  helical interface sequence
CPVGLIG

SEQ ID NO: 12062 - protein, 20 aa, Artificial
  helical interface sequence
VNYFLDGERQLGTRLMELRN

SEQ ID NO: 12063 - protein, 13 aa, Artificial
  helical interface sequence
PLNAFDGALLNAG

SEQ ID NO: 12064 - protein, 9 aa, Artificial
  helical interface sequence
QAVLSLYAS

SEQ ID NO: 12065 - protein, 9 aa, Artificial
  helical interface sequence
QAVLSLYAS

SEQ ID NO: 12066 - protein, 12 aa, Artificial
  helical interface sequence
SVWIGGSILASL

SEQ ID NO: 12067 - protein, 6 aa, Artificial
  helical interface sequence
WNKILS

SEQ ID NO: 12068 - protein, 15 aa, Artificial
  helical interface sequence
FPEFLTMMARKMKDT

SEQ ID NO: 12069 - protein, 8 aa, Artificial
  helical interface sequence
LGDYLRAI

SEQ ID NO: 12070 - protein, 11 aa, Artificial
  helical interface sequence
AVPRAILELAG

SEQ ID NO: 12071 - protein, 18 aa, Artificial
  helical interface sequence
DMKRLEVDIDIKIRSCRG

SEQ ID NO: 12072 - protein, 8 aa, Artificial
  helical interface sequence
QNWNKIIR

SEQ ID NO: 12073 - protein, 14 aa, Artificial
  helical interface sequence
ADFLLEQESKRLKQ

SEQ ID NO: 12074 - protein, 13 aa, Artificial
  helical interface sequence
FIDYAIEYSEKYA

SEQ ID NO: 12075 - protein, 17 aa, Artificial
  helical interface sequence
IDEFTETTSKAIEVIGG

SEQ ID NO: 12076 - protein, 14 aa, Artificial
  helical interface sequence
EQIAEFKEAFSLFD

SEQ ID NO: 12077 - protein, 7 aa, Artificial
  helical interface sequence
AEMISRS

SEQ ID NO: 12078 - protein, 9 aa, Artificial
  helical interface sequence
QAVLSLYAS

SEQ ID NO: 12079 - protein, 9 aa, Artificial
  helical interface sequence
QAVLSLYAS

SEQ ID NO: 12080 - protein, 11 aa, Artificial
  helical interface sequence
REWIFQAIKTH

SEQ ID NO: 12081 - protein, 5 aa, Artificial
  helical interface sequence
EQYFD

SEQ ID NO: 12082 - protein, 18 aa, Artificial
  helical interface sequence
GKEQRILAKTIKRARILG

SEQ ID NO: 12083 - protein, 21 aa, Artificial
  helical interface sequence
FQEFMAFVAMITTACHEFFEH

SEQ ID NO: 12084 - protein, 12 aa, Artificial
  helical interface sequence
AFASVQYIMTDV

SEQ ID NO: 12085 - protein, 9 aa, Artificial
  helical interface sequence
YREMLKAER

SEQ ID NO: 12086 - protein, 24 aa, Artificial
  helical interface sequence
PRLNNLSYWMYVCGVALGVASLLA

SEQ ID NO: 12087 - protein, 31 aa, Artificial
  helical interface sequence
RHQQATFAGFIKGATWVSILSIAVLVFLALA

SEQ ID NO: 12088 - protein, 14 aa, Artificial
  helical interface sequence
EVSDALVLQLIRIG

SEQ ID NO: 12089 - protein, 14 aa, Artificial
  helical interface sequence
LGLYNEAVKIIHDF

SEQ ID NO: 12090 - protein, 10 aa, Artificial
  helical interface sequence
TNETTKSIER

SEQ ID NO: 12091 - protein, 19 aa, Artificial
  helical interface sequence
RLPALRSISLKSFEHLFFF

SEQ ID NO: 12092 - protein, 5 aa, Artificial
  helical interface sequence
EIAKL

SEQ ID NO: 12093 - protein, 13 aa, Artificial
  helical interface sequence
KAEVAAEFLNDRV

SEQ ID NO: 12094 - protein, 7 aa, Artificial
  helical interface sequence
VKKFLER

SEQ ID NO: 12095 - protein, 17 aa, Artificial
  helical interface sequence
QELELSLNMAFARAREH

SEQ ID NO: 12096 - protein, 20 aa, Artificial
  helical interface sequence
VEEEVIKRELTEKVKEAVSK

SEQ ID NO: 12097 - protein, 15 aa, Artificial
  helical interface sequence
PYSNQIEREELILKY

SEQ ID NO: 12098 - protein, 15 aa, Artificial
  helical interface sequence
DVKQLTEAVQKITTE

SEQ ID NO: 12099 - protein, 18 aa, Artificial
  helical interface sequence
CDVLAKRMANLSQIYTQR

SEQ ID NO: 12100 - protein, 22 aa, Artificial
  helical interface sequence
AADTQAIADIVQYHLELYTSQY

SEQ ID NO: 12101 - protein, 15 aa, Artificial
  helical interface sequence
PETFTQLVSSSLYER

SEQ ID NO: 12102 - protein, 27 aa, Artificial
  helical interface sequence
TVRWVAVHTLAVPTIFFLGAIAAMQFI

SEQ ID NO: 12103 - protein, 7 aa, Artificial
  helical interface sequence
PTHRAAA

SEQ ID NO: 12104 - protein, 16 aa, Artificial
  helical interface sequence
MEGTGLMLMANLFKTS

SEQ ID NO: 12105 - protein, 12 aa, Artificial
  helical interface sequence
NKNQLHGDKLMA

SEQ ID NO: 12106 - protein, 11 aa, Artificial
  helical interface sequence
EKEIMAEIYKN

SEQ ID NO: 12107 - protein, 5 aa, Artificial
  helical interface sequence
PYING

SEQ ID NO: 12108 - protein, 27 aa, Artificial
  helical interface sequence
SQNLAAVNKSLSDALQHLAQSDTYLSA

SEQ ID NO: 12109 - protein, 25 aa, Artificial
  helical interface sequence
RDLRLSLAKAITQRVILKAAQGAMY

SEQ ID NO: 12110 - protein, 5 aa, Artificial
  helical interface sequence
KDEYE

SEQ ID NO: 12111 - protein, 9 aa, Artificial
  helical interface sequence
KILHRLLQE

SEQ ID NO: 12112 - protein, 15 aa, Artificial
  helical interface sequence
INVVTCAAGILSNLT

SEQ ID NO: 12113 - protein, 17 aa, Artificial
  helical interface sequence
ENIQRVAAGVLCELAQD

SEQ ID NO: 12114 - protein, 5 aa, Artificial
  helical interface sequence
WRARG

SEQ ID NO: 12115 - protein, 13 aa, Artificial
  helical interface sequence
GDWYAGINFAAVQ

SEQ ID NO: 12116 - protein, 14 aa, Artificial
  helical interface sequence
AKNYGRAVYECLRG

SEQ ID NO: 12117 - protein, 14 aa, Artificial
  helical interface sequence
DEQIAAQVDYIVAN

SEQ ID NO: 12118 - protein, 14 aa, Artificial
  helical interface sequence
AKNYGRAVYECLRG

SEQ ID NO: 12119 - protein, 21 aa, Artificial
  helical interface sequence
NAPGAAANRVALEACTQARNE

SEQ ID NO: 12120 - protein, 24 aa, Artificial
  helical interface sequence
FLDQQAQERSMDKCLGWFLEPVVR

SEQ ID NO: 12121 - protein, 12 aa, Artificial
  helical interface sequence
AWELRKGMNTLV

SEQ ID NO: 12122 - protein, 15 aa, Artificial
  helical interface sequence
VTEAYASVQYIMNEV

SEQ ID NO: 12123 - protein, 11 aa, Artificial
  helical interface sequence
TNETTKSIERG

SEQ ID NO: 12124 - protein, 9 aa, Artificial
  helical interface sequence
MHIPELADE

SEQ ID NO: 12125 - protein, 15 aa, Artificial
  helical interface sequence
HDHVAWAFARKANEM

SEQ ID NO: 12126 - protein, 5 aa, Artificial
  helical interface sequence
ICVAY

SEQ ID NO: 12127 - protein, 10 aa, Artificial
  helical interface sequence
IHGATVENTL

SEQ ID NO: 12128 - protein, 14 aa, Artificial
  helical interface sequence
AKNYGRACYECLRG

SEQ ID NO: 12129 - protein, 8 aa, Artificial
  helical interface sequence
YNPIYRAG

SEQ ID NO: 12130 - protein, 12 aa, Artificial
  helical interface sequence
YESMRARIRARV

SEQ ID NO: 12131 - protein, 10 aa, Artificial
  helical interface sequence
GSNPATASMA

SEQ ID NO: 12132 - protein, 11 aa, Artificial
  helical interface sequence
PEAVRRALAER

SEQ ID NO: 12133 - protein, 18 aa, Artificial
  helical interface sequence
GAHGELTGILIIRAYHED

SEQ ID NO: 12134 - protein, 15 aa, Artificial
  helical interface sequence
NQPFALEMIKSRQKK

SEQ ID NO: 12135 - protein, 6 aa, Artificial
  helical interface sequence
SEQLTS

SEQ ID NO: 12136 - protein, 21 aa, Artificial
  helical interface sequence
RLPALRSIGLKCLEHLFFFKL

SEQ ID NO: 12137 - protein, 23 aa, Artificial
  helical interface sequence
EKKRKISIFRGIQAYNEIENVLK

SEQ ID NO: 12138 - protein, 23 aa, Artificial
  helical interface sequence
EKKRKISIFRGIQAYNEIENVLK

SEQ ID NO: 12139 - protein, 23 aa, Artificial
  helical interface sequence
EKKRKISIFRGIQAYNEIENVLK

SEQ ID NO: 12140 - protein, 5 aa, Artificial
  helical interface sequence
LKARC

SEQ ID NO: 12141 - protein, 23 aa, Artificial
  helical interface sequence
VADARVLVDFARISAQQEKVTYG

SEQ ID NO: 12142 - protein, 15 aa, Artificial
  helical interface sequence
IENLVKRVADQMQQY

SEQ ID NO: 12143 - protein, 16 aa, Artificial
  helical interface sequence
MLERAKVKDEWAKAYG

SEQ ID NO: 12144 - protein, 18 aa, Artificial
  helical interface sequence
IPTLESMLDHLAGQHAVR

SEQ ID NO: 12145 - protein, 23 aa, Artificial
  helical interface sequence
EKIEAIKKKEKLLRHVDSLIEDF

SEQ ID NO: 12146 - protein, 32 aa, Artificial; identical to SEQ ID NO: 1328
  helical interface sequence

SEQ ID NO: 12147 - protein, 11 aa, Artificial
  helical interface sequence
AAELRHVMTNL

SEQ ID NO: 12148 - protein, 16 aa, Artificial
  helical interface sequence
EQIKRKKYEIVTLRNR

SEQ ID NO: 12149 - protein, 16 aa, Artificial
  helical interface sequence
MHLLSCLESLRVSLNN

SEQ ID NO: 12150 - protein, 16 aa, Artificial
  helical interface sequence
LSLALYVFDEYLQKTV

SEQ ID NO: 12151 - protein, 15 aa, Artificial
  helical interface sequence
VVSALQMLKQHLFKY

SEQ ID NO: 12152 - protein, 17 aa, Artificial
  helical interface sequence
PSYIFEYLATVMYQRRS

SEQ ID NO: 12153 - protein, 23 aa, Artificial
  helical interface sequence
TADARSMIEHARTAAVTHNLYYD

SEQ ID NO: 12154 - protein, 18 aa, Artificial
  helical interface sequence
APDARVLSNYLRQQCNYS

SEQ ID NO: 12155 - protein, 15 aa, Artificial
  helical interface sequence
VVSALQMLKQHLFKY

SEQ ID NO: 12156 - protein, 11 aa, Artificial
  helical interface sequence
LIMPFLDNQVN

SEQ ID NO: 12157 - protein, 5 aa, Artificial
  helical interface sequence
YINAN

SEQ ID NO: 12158 - protein, 9 aa, Artificial
  helical interface sequence
YCNQMMRRR

SEQ ID NO: 12159 - protein, 5 aa, Artificial
  helical interface sequence
YINAN

SEQ ID NO: 12160 - protein, 29 aa, Artificial
  helical interface sequence
SKAMSIMNSFVNDVFERIAGEASRLAHYN

SEQ ID NO: 12161 - protein, 24 aa, Artificial
  helical interface sequence
AKIKREWLEVLEETKRALSDKRRR

SEQ ID NO: 12162 - protein, 8 aa, Artificial
  helical interface sequence
RPDAEYWN

SEQ ID NO: 12163 - protein, 19 aa, Artificial
  helical interface sequence
GGQIIPTMRRATYAGFLLA

SEQ ID NO: 12164 - protein, 8 aa, Artificial
  helical interface sequence
FIDYLKYT

SEQ ID NO: 12165 - protein, 12 aa, Artificial
  helical interface sequence
EEEIREAFRVFD

SEQ ID NO: 12166 - protein, 6 aa, Artificial
  helical interface sequence
VAWRNR

SEQ ID NO: 12167 - protein, 25 aa, Artificial
  helical interface sequence
TRPVVAAGAVGLAQRALDEATKYAL

SEQ ID NO: 12168 - protein, 11 aa, Artificial
  helical interface sequence
RQMLDRKLLLG

SEQ ID NO: 12169 - protein, 6 aa, Artificial
  helical interface sequence
PQTKIY

SEQ ID NO: 12170 - protein, 23 aa, Artificial
  helical interface sequence
LDDQVILLRAGWNELLIASFSHR

SEQ ID NO: 12171 - protein, 13 aa, Artificial
  helical interface sequence
RLPALRSIGLKCL

SEQ ID NO: 12172 - protein, 5 aa, Artificial
  helical interface sequence
PGRTL

SEQ ID NO: 12173 - protein, 12 aa, Artificial
  helical interface sequence
DALNNIINNARD

SEQ ID NO: 12174 - protein, 9 aa, Artificial
  helical interface sequence
MGNMKYLYD

SEQ ID NO: 12175 - protein, 13 aa, Artificial
  helical interface sequence
GEYRRRLKRELLG

SEQ ID NO: 12176 - protein, 16 aa, Artificial
  helical interface sequence
LTDRVAEFIKRRKADV

SEQ ID NO: 12177 - protein, 12 aa, Artificial
  helical interface sequence
DEEVDEMIREAD

SEQ ID NO: 12178 - protein, 6 aa, Artificial
  helical interface sequence
ADWAQE

SEQ ID NO: 12179 - protein, 14 aa, Artificial
  helical interface sequence
GNKRLDIVNRINSN

SEQ ID NO: 12180 - protein, 10 aa, Artificial
  helical interface sequence
TGPMDEYLIA

SEQ ID NO: 12181 - protein, 10 aa, Artificial
  helical interface sequence
TGPMDEYLIA

SEQ ID NO: 12182 - protein, 19 aa, Artificial
  helical interface sequence
MAAVKQALREAGDEFELRY

SEQ ID NO: 12183 - protein, 8 aa, Artificial
  helical interface sequence
GLDKIEAL

SEQ ID NO: 12184 - protein, 17 aa, Artificial
  helical interface sequence
NSEVHMLLEHRKQQNES

SEQ ID NO: 12185 - protein, 23 aa, Artificial
  helical interface sequence
AEFLTQSKTRIQEYEKELEKMRN

SEQ ID NO: 12186 - protein, 10 aa, Artificial
  helical interface sequence
HVLAKLMVKK

SEQ ID NO: 12187 - protein, 7 aa, Artificial
  helical interface sequence
GVLVSNR

SEQ ID NO: 12188 - protein, 17 aa, Artificial
  helical interface sequence
QEEEELQLALALSQSEA

SEQ ID NO: 12189 - protein, 37 aa, Artificial; identical to SEQ ID NO: 9091
  helical interface sequence

SEQ ID NO: 12190 - protein, 16 aa, Artificial
  helical interface sequence
DFEILEMAVRELAIEK

SEQ ID NO: 12191 - protein, 22 aa, Artificial
  helical interface sequence
LMEINTSGTFLTQALNHMYKLR

SEQ ID NO: 12192 - protein, 6 aa, Artificial
  helical interface sequence
DEQLKS

SEQ ID NO: 12193 - protein, 10 aa, Artificial
  helical interface sequence
PEELAFAREF

SEQ ID NO: 12194 - protein, 7 aa, Artificial
  helical interface sequence
CEDIARV

SEQ ID NO: 12195 - protein, 18 aa, Artificial
  helical interface sequence
RQLANVYAQTLGTIFTEQ

SEQ ID NO: 12196 - protein, 21 aa, Artificial
  helical interface sequence
MNSFVNDVFERIAGEASRLAH

SEQ ID NO: 12197 - protein, 6 aa, Artificial
  helical interface sequence
DEQLKS

SEQ ID NO: 12198 - protein, 7 aa, Artificial
  helical interface sequence
DRLRPLS

SEQ ID NO: 12199 - protein, 10 aa, Artificial
  helical interface sequence
YEELKHLLSR

SEQ ID NO: 12200 - protein, 52 aa, Artificial; identical to SEQ ID NO: 499
  helical interface sequence

SEQ ID NO: 12201 - protein, 11 aa, Artificial
  helical interface sequence
PTEVMGVASFY

SEQ ID NO: 12202 - protein, 19 aa, Artificial
  helical interface sequence
TPCREGVAGFMVNLFAKIG

SEQ ID NO: 12203 - protein, 28 aa, Artificial
  helical interface sequence
LMARKQAGFTAVMFLTVLSVLLYLTNKR

SEQ ID NO: 12204 - protein, 5 aa, Artificial
  helical interface sequence
FFKSA

SEQ ID NO: 12205 - protein, 6 aa, Artificial
  helical interface sequence
PVSEKH

SEQ ID NO: 12206 - protein, 36 aa, Artificial; identical to SEQ ID NO: 4773
  helical interface sequence

SEQ ID NO: 12207 - protein, 11 aa, Artificial
  helical interface sequence
QRFLTQALHYN

SEQ ID NO: 12208 - protein, 8 aa, Artificial
  helical interface sequence
LDESCKIL

SEQ ID NO: 12209 - protein, 15 aa, Artificial
  helical interface sequence
MDKINNRFNYLFEVN

SEQ ID NO: 12210 - protein, 15 aa, Artificial
  helical interface sequence
MDKINNRFNYLFEVN

SEQ ID NO: 12211 - protein, 11 aa, Artificial
  helical interface sequence
FFQFAEMIVKM

SEQ ID NO: 12212 - protein, 6 aa, Artificial
  helical interface sequence
EQLERE

SEQ ID NO: 12213 - protein, 14 aa, Artificial
  helical interface sequence
SLTYFCVAGDVEGA

SEQ ID NO: 12214 - protein, 7 aa, Artificial
  helical interface sequence
RELAHKG

SEQ ID NO: 12215 - protein, 15 aa, Artificial
  helical interface sequence
ESVLNVIAADVTLVG

SEQ ID NO: 12216 - protein, 27 aa, Artificial
  helical interface sequence
GLIYEETRGVLKVFLENVIRDAVTYTE

SEQ ID NO: 12217 - protein, 14 aa, Artificial
  helical interface sequence
RSTVAQLVQTLEQH

SEQ ID NO: 12218 - protein, 6 aa, Artificial
  helical interface sequence
RGISEL

SEQ ID NO: 12219 - protein, 12 aa, Artificial
  helical interface sequence
VFYLHSRLLERA

SEQ ID NO: 12220 - protein, 26 aa, Artificial
  helical interface sequence
LLQKNVRAQLVDMKRLEVDIDIKIRS

SEQ ID NO: 12221 - protein, 27 aa, Artificial
  helical interface sequence
PEGLRVFYYLVQDLKCLVFSLIGLHFK

SEQ ID NO: 12222 - protein, 15 aa, Artificial
  helical interface sequence
KEEMMDIVKAIYDMM

SEQ ID NO: 12223 - protein, 14 aa, Artificial
  helical interface sequence
FEDFVTALSILLRG

SEQ ID NO: 12224 - protein, 11 aa, Artificial
  helical interface sequence
STTMIRILKEM

SEQ ID NO: 12225 - protein, 10 aa, Artificial
  helical interface sequence
NNDVIGRIEN

SEQ ID NO: 12226 - protein, 10 aa, Artificial
  helical interface sequence
HEILEMTNKF

SEQ ID NO: 12227 - protein, 5 aa, Artificial
  helical interface sequence
RNEMR

SEQ ID NO: 12228 - protein, 15 aa, Artificial
  helical interface sequence
TREGNDLYHEMIESG

SEQ ID NO: 12229 - protein, 28 aa, Artificial
  helical interface sequence
SEHYDVARGVQKILQDYKSLQDIIAILG

SEQ ID NO: 12230 - protein, 14 aa, Artificial
  helical interface sequence
SKQAVAYRQMSLLL

SEQ ID NO: 12231 - protein, 15 aa, Artificial
  helical interface sequence
PLCLSELGQTEKWAQ

SEQ ID NO: 12232 - protein, 11 aa, Artificial
  helical interface sequence
LPLFDAIRPLI

SEQ ID NO: 12233 - protein, 15 aa, Artificial
  helical interface sequence
MTPTVIAVHYLDETE

SEQ ID NO: 12234 - protein, 11 aa, Artificial
  helical interface sequence
PYQGRELAFKL

SEQ ID NO: 12235 - protein, 10 aa, Artificial
  helical interface sequence
ERVKRGMAEM

SEQ ID NO: 12236 - protein, 10 aa, Artificial
  helical interface sequence
ERVKRGMAEM

SEQ ID NO: 12237 - protein, 9 aa, Artificial
  helical interface sequence
NHVKKFLER

SEQ ID NO: 12238 - protein, 17 aa, Artificial
  helical interface sequence
GETIEDLLHFCRTMYSM

SEQ ID NO: 12239 - protein, 32 aa, Artificial; identical to SEQ ID NO: 2168
  helical interface sequence

SEQ ID NO: 12240 - protein, 12 aa, Artificial
  helical interface sequence
IKLWKTFTDCFN

SEQ ID NO: 12241 - protein, 7 aa, Artificial
  helical interface sequence
DRLRPLS

SEQ ID NO: 12242 - protein, 7 aa, Artificial
  helical interface sequence
KDEYERH

SEQ ID NO: 12243 - protein, 13 aa, Artificial
  helical interface sequence
PLRVFFTVSLPLS

SEQ ID NO: 12244 - protein, 9 aa, Artificial
  helical interface sequence
KTSLVLRYC

SEQ ID NO: 12245 - protein, 13 aa, Artificial
  helical interface sequence
LKTVFDEAIRAVL

SEQ ID NO: 12246 - protein, 5 aa, Artificial
  helical interface sequence
DRLRP

SEQ ID NO: 12247 - protein, 10 aa, Artificial
  helical interface sequence
ANEATKTLNR

SEQ ID NO: 12248 - protein, 21 aa, Artificial
  helical interface sequence
WGRIVAFFSFGGALCVESVDK

SEQ ID NO: 12249 - protein, 19 aa, Artificial
  helical interface sequence
QMAAVKQALREAGDEFELR

SEQ ID NO: 12250 - protein, 15 aa, Artificial
  helical interface sequence
VADMLVKVNALIKDR

SEQ ID NO: 12251 - protein, 17 aa, Artificial
  helical interface sequence
DSEFKHALARNLRSLTR

SEQ ID NO: 12252 - protein, 8 aa, Artificial
  helical interface sequence
FDCFRMWF

SEQ ID NO: 12253 - protein, 6 aa, Artificial
  helical interface sequence
VPMRER

SEQ ID NO: 12254 - protein, 12 aa, Artificial
  helical interface sequence
EVALQEYRTVAR

SEQ ID NO: 12255 - protein, 6 aa, Artificial
  helical interface sequence
EIKDIL

SEQ ID NO: 12256 - protein, 11 aa, Artificial
  helical interface sequence
FASVEHIMRNV

SEQ ID NO: 12257 - protein, 11 aa, Artificial
  helical interface sequence
IGHSIQTWLLG

SEQ ID NO: 12258 - protein, 32 aa, Artificial; identical to SEQ ID NO: 462
  helical interface sequence

SEQ ID NO: 12259 - protein, 29 aa, Artificial
  helical interface sequence
RRDFLYYATAGAGAVATGAAVWPLINQMN

SEQ ID NO: 12260 - protein, 29 aa, Artificial
  helical interface sequence
GFMLRYLHANGASLFFIAVYLHIFRGLYY

SEQ ID NO: 12261 - protein, 13 aa, Artificial
  helical interface sequence
QVAELIEKDMKKN

SEQ ID NO: 12262 - protein, 9 aa, Artificial
  helical interface sequence
VEKIKEVIS

SEQ ID NO: 12263 - protein, 11 aa, Artificial
  helical interface sequence
KEDLDVASRFL

SEQ ID NO: 12264 - protein, 16 aa, Artificial
  helical interface sequence
KAVDWWALGVLIYEMA

SEQ ID NO: 12265 - protein, 13 aa, Artificial
  helical interface sequence
TAACLRRLFRAIF

SEQ ID NO: 12266 - protein, 13 aa, Artificial
  helical interface sequence
ANKRLDAVNRITA

SEQ ID NO: 12267 - protein, 7 aa, Artificial
  helical interface sequence
DGSVGYS

SEQ ID NO: 12268 - protein, 7 aa, Artificial
  helical interface sequence
RAELVRM

SEQ ID NO: 12269 - protein, 10 aa, Artificial
  helical interface sequence
IPQSRELIAQ

SEQ ID NO: 12270 - protein, 25 aa, Artificial
  helical interface sequence
NRRMAACLRDMEIILRYVSYALLAG

SEQ ID NO: 12271 - protein, 8 aa, Artificial
  helical interface sequence
LREVNRTF

SEQ ID NO: 12272 - protein, 16 aa, Artificial
  helical interface sequence
IDTARIIFNQVMEKEF

SEQ ID NO: 12273 - protein, 22 aa, Artificial
  helical interface sequence
LFFRYMAIGGYVGAATVGAAAW

SEQ ID NO: 12274 - protein, 8 aa, Artificial
  helical interface sequence
RGAIYYFK

SEQ ID NO: 12275 - protein, 20 aa, Artificial
  helical interface sequence
HFDRIVDEVQGFFEVHRALG

SEQ ID NO: 12276 - protein, 19 aa, Artificial
  helical interface sequence
PVNFKLLSHCLLVTLAAHL

SEQ ID NO: 12277 - protein, 19 aa, Artificial
  helical interface sequence
IEAAREIIIREISKVLAEQ

SEQ ID NO: 12278 - protein, 22 aa, Artificial
  helical interface sequence
AQGALANIAVDKANLEIMTKRS

SEQ ID NO: 12279 - protein, 13 aa, Artificial
  helical interface sequence
KDILEQARAAVDT

SEQ ID NO: 12280 - protein, 10 aa, Artificial
  helical interface sequence
LSHFLQHMLF

SEQ ID NO: 12281 - protein, 22 aa, Artificial
  helical interface sequence
LAETRSVDIVTGADVLEYYAGL

SEQ ID NO: 12282 - protein, 14 aa, Artificial
  helical interface sequence
PNTVAQVLKKLAVF

SEQ ID NO: 12283 - protein, 21 aa, Artificial
  helical interface sequence
ASIHDTVENLIILANNSLSSN

SEQ ID NO: 12284 - protein, 5 aa, Artificial
  helical interface sequence
TWIFR

SEQ ID NO: 12285 - protein, 15 aa, Artificial
  helical interface sequence
IPAFADRLGQYVQAH

SEQ ID NO: 12286 - protein, 13 aa, Artificial
  helical interface sequence
YSGFYTFSLLDHH

SEQ ID NO: 12287 - protein, 12 aa, Artificial
  helical interface sequence
PEAHASLDKFLC

SEQ ID NO: 12288 - protein, 6 aa, Artificial
  helical interface sequence
RDASTL

SEQ ID NO: 12289 - protein, 16 aa, Artificial
  helical interface sequence
FEKTLTPIIQEYFEHG

SEQ ID NO: 12290 - protein, 46 aa, Artificial
  helical interface sequence
VPVLKAQADIYKADFQAERHAREKLVEKKEYLQEQLEQLQREFNKL

SEQ ID NO: 12291 - protein, 46 aa, Artificial; identical to SEQ ID NO: 12290
  helical interface sequence

SEQ ID NO: 12292 - protein, 13 aa, Artificial
  helical interface sequence
PWQERRAAEYMTH

SEQ ID NO: 12293 - protein, 7 aa, Artificial
  helical interface sequence
FVFGFLS

SEQ ID NO: 12294 - protein, 10 aa, Artificial
  helical interface sequence
SRTREILTKT

SEQ ID NO: 12295 - protein, 5 aa, Artificial
  helical interface sequence
DEQLK

SEQ ID NO: 12296 - protein, 15 aa, Artificial
  helical interface sequence
DKAAEDTIKRLVMRE

SEQ ID NO: 12297 - protein, 13 aa, Artificial
  helical interface sequence
LRDLLMVPMQRVL

SEQ ID NO: 12298 - protein, 19 aa, Artificial
  helical interface sequence
SGRIVGFFDVGRYVCEEVL

SEQ ID NO: 12299 - protein, 9 aa, Artificial
  helical interface sequence
TKSYWKALG

SEQ ID NO: 12300 - protein, 15 aa, Artificial
  helical interface sequence
SRLLRVMQCLSRIEE

SEQ ID NO: 12301 - protein, 8 aa, Artificial
  helical interface sequence
SGSLANNI

SEQ ID NO: 12302 - protein, 12 aa, Artificial
  helical interface sequence
SREIQTAVRLLL

SEQ ID NO: 12303 - protein, 7 aa, Artificial
  helical interface sequence
EAEISHT

SEQ ID NO: 12304 - protein, 9 aa, Artificial
  helical interface sequence
WERFFELTG

SEQ ID NO: 12305 - protein, 7 aa, Artificial
  helical interface sequence
LLQLARI

SEQ ID NO: 12306 - protein, 7 aa, Artificial
  helical interface sequence
LPGLFDG

SEQ ID NO: 12307 - protein, 16 aa, Artificial
  helical interface sequence
TSELIYAGLEAIQKRG

SEQ ID NO: 12308 - protein, 14 aa, Artificial
  helical interface sequence
LIEGAYTASALLEA

SEQ ID NO: 12309 - protein, 19 aa, Artificial
  helical interface sequence
VDTRQKQLAAWCSLVLSFC

SEQ ID NO: 12310 - protein, 5 aa, Artificial
  helical interface sequence
LDRLY

SEQ ID NO: 12311 - protein, 36 aa, Artificial; identical to SEQ ID NO: 737
  helical interface sequence

SEQ ID NO: 12312 - protein, 14 aa, Artificial
  helical interface sequence
HPNRVLEHLHSTAF

SEQ ID NO: 12313 - protein, 27 aa, Artificial
  helical interface sequence
VGTIFAGAFVFQTVFDTAITSWYENHN

SEQ ID NO: 12314 - protein, 13 aa, Artificial
  helical interface sequence
LWKAFFFVTLPLS

SEQ ID NO: 12315 - protein, 19 aa, Artificial
  helical interface sequence
PAVHASLDKFFSAVSTVLT

SEQ ID NO: 12316 - protein, 42 aa, Artificial; identical to SEQ ID NO: 8298
  helical interface sequence

SEQ ID NO: 12317 - protein, 21 aa, Artificial
  helical interface sequence
ASTNAVIAAVCATEVFKIATS

SEQ ID NO: 12318 - protein, 15 aa, Artificial
  helical interface sequence
IIARRWINGMLISLL

SEQ ID NO: 12319 - protein, 25 aa, Artificial
  helical interface sequence
EEMTATCLRDLDYYLRLVTYGIVAG

SEQ ID NO: 12320 - protein, 11 aa, Artificial
  helical interface sequence
ALELLMAANFL

SEQ ID NO: 12321 - protein, 6 aa, Artificial
  helical interface sequence
DSTNKE

SEQ ID NO: 12322 - protein, 8 aa, Artificial
  helical interface sequence
PEYRKLLE

SEQ ID NO: 12323 - protein, 19 aa, Artificial
  helical interface sequence
PEVHASLDKFVLAVGTVLT

SEQ ID NO: 12324 - protein, 20 aa, Artificial
  helical interface sequence
PENFRLLGDILVIILAAHFG

SEQ ID NO: 12325 - protein, 18 aa, Artificial
  helical interface sequence
LEWIFLIAVALITIFGII

SEQ ID NO: 12326 - protein, 19 aa, Artificial
  helical interface sequence
YIAPIIGTIIVFLMVVYAE

SEQ ID NO: 12327 - protein, 19 aa, Artificial
  helical interface sequence
FRNTLHFHIKASKAYMHQR

SEQ ID NO: 12328 - protein, 6 aa, Artificial
  helical interface sequence
PTYKFF

SEQ ID NO: 12329 - protein, 24 aa, Artificial
  helical interface sequence
AAEYYRAYLEGECVEWLHRYLKNG

SEQ ID NO: 12330 - protein, 9 aa, Artificial
  helical interface sequence
MFSHLRRIG

SEQ ID NO: 12331 - protein, 11 aa, Artificial
  helical interface sequence
PLDAAVHHSEV

SEQ ID NO: 12332 - protein, 5 aa, Artificial
  helical interface sequence
YQNAN

SEQ ID NO: 12333 - protein, 7 aa, Artificial
  helical interface sequence
RPILQGF

SEQ ID NO: 12334 - protein, 5 aa, Artificial
  helical interface sequence
KILED

SEQ ID NO: 12335 - protein, 12 aa, Artificial
  helical interface sequence
YASLRSLVASSG

SEQ ID NO: 12336 - protein, 19 aa, Artificial
  helical interface sequence
LKSTQAAIDQINGKLNRVI

SEQ ID NO: 12337 - protein, 19 aa, Artificial
  helical interface sequence
ADAAAHEVIEGQASALEEL

SEQ ID NO: 12338 - protein, 11 aa, Artificial
  helical interface sequence
RICLRELAHKG

SEQ ID NO: 12339 - protein, 14 aa, Artificial
  helical interface sequence
PEIAKEIYTTLGNQ

SEQ ID NO: 12340 - protein, 8 aa, Artificial
  helical interface sequence
VAWRNRCK

SEQ ID NO: 12341 - protein, 11 aa, Artificial
  helical interface sequence
QEVKMVAWWIG

SEQ ID NO: 12342 - protein, 5 aa, Artificial
  helical interface sequence
DGRLA

SEQ ID NO: 12343 - protein, 7 aa, Artificial
  helical interface sequence
AELFYKG

SEQ ID NO: 12344 - protein, 29 aa, Artificial
  helical interface sequence
MINRYSILYNRTRQAVITNELVDIITGAS

SEQ ID NO: 12345 - protein, 23 aa, Artificial
  helical interface sequence
LQEASDVLDDQIESFTKIIQNHY

SEQ ID NO: 12346 - protein, 12 aa, Artificial
  helical interface sequence
IKNLRRVAKELG

SEQ ID NO: 12347 - protein, 18 aa, Artificial
  helical interface sequence
DSTRETVLKQIREFLEEI

SEQ ID NO: 12348 - protein, 5 aa, Artificial
  helical interface sequence
VQAWI

SEQ ID NO: 12349 - protein, 5 aa, Artificial
  helical interface sequence
KYELD

SEQ ID NO: 12350 - protein, 7 aa, Artificial
  helical interface sequence
LADQALH

SEQ ID NO: 12351 - protein, 29 aa, Artificial
  helical interface sequence
IRYLQEIYNSNNQKIVNLKEKVAQLEAQC

SEQ ID NO: 12352 - protein, 27 aa, Artificial
  helical interface sequence
RVLRSILENLRSKIQKLESDVSAQMEY

SEQ ID NO: 12353 - protein, 18 aa, Artificial
  helical interface sequence
KVYIGKLNMILVQILKQE

SEQ ID NO: 12354 - protein, 14 aa, Artificial
  helical interface sequence
RRMGVEMTLLRALA

SEQ ID NO: 12355 - protein, 13 aa, Artificial
  helical interface sequence
IFEMYARTRDEGF

SEQ ID NO: 12356 - protein, 7 aa, Artificial
  helical interface sequence
REKALMN

SEQ ID NO: 12357 - protein, 30 aa, Artificial; identical to SEQ ID NO: 10298
  helical interface sequence

SEQ ID NO: 12358 - protein, 6 aa, Artificial
  helical interface sequence
LYKMRT

SEQ ID NO: 12359 - protein, 29 aa, Artificial
  helical interface sequence
PEYWDGETRKVKAHSQTHRVDLGTLRGYY

SEQ ID NO: 12360 - protein, 6 aa, Artificial
  helical interface sequence
SSDFEA

SEQ ID NO: 12361 - protein, 10 aa, Artificial
  helical interface sequence
DNTLFKWMIF

SEQ ID NO: 12362 - protein, 5 aa, Artificial
  helical interface sequence
LEDVS

SEQ ID NO: 12363 - protein, 6 aa, Artificial
  helical interface sequence
IGIVAA

SEQ ID NO: 12364 - protein, 6 aa, Artificial
  helical interface sequence
LDDMEE

SEQ ID NO: 12365 - protein, 12 aa, Artificial
  helical interface sequence
HTLGNLIRAELL

SEQ ID NO: 12366 - protein, 16 aa, Artificial
  helical interface sequence
PVNFKLLSHCLLVTLA

SEQ ID NO: 12367 - protein, 14 aa, Artificial
  helical interface sequence
RELVRAQIAICGMS

SEQ ID NO: 12368 - protein, 6 aa, Artificial
  helical interface sequence
DEQLKS

SEQ ID NO: 12369 - protein, 7 aa, Artificial
  helical interface sequence
PWTQRFF

SEQ ID NO: 12370 - protein, 6 aa, Artificial
  helical interface sequence
SYRRFL

SEQ ID NO: 12371 - protein, 7 aa, Artificial
  helical interface sequence
PRHYMMT

SEQ ID NO: 12372 - protein, 17 aa, Artificial
  helical interface sequence
PDSILRVLSQMQKIVRV

SEQ ID NO: 12373 - protein, 13 aa, Artificial
  helical interface sequence
PGELDRIKSFVTS

SEQ ID NO: 12374 - protein, 12 aa, Artificial
  helical interface sequence
AMDVVYALKRQG

SEQ ID NO: 12375 - protein, 19 aa, Artificial
  helical interface sequence
AAELNRLVIECEQKKLARM

SEQ ID NO: 12376 - protein, 6 aa, Artificial
  helical interface sequence
AHCMDG

SEQ ID NO: 12377 - protein, 14 aa, Artificial
  helical interface sequence
GEKRLRIAQILTDN

SEQ ID NO: 12378 - protein, 14 aa, Artificial
  helical interface sequence
GEKRLRIAQILTDN

SEQ ID NO: 12379 - protein, 10 aa, Artificial
  helical interface sequence
AENRERFKAD

SEQ ID NO: 12380 - protein, 14 aa, Artificial
  helical interface sequence
DEQITKQLEYCLNQ

SEQ ID NO: 12381 - protein, 16 aa, Artificial
  helical interface sequence
ILNEGPEILRDAARWC

SEQ ID NO: 12382 - protein, 14 aa, Artificial
  helical interface sequence
DEQITKQLEYCLNQ

SEQ ID NO: 12383 - protein, 9 aa, Artificial
  helical interface sequence
PIKVLHEAE

SEQ ID NO: 12384 - protein, 8 aa, Artificial
  helical interface sequence
PIKVLHEA

SEQ ID NO: 12385 - protein, 10 aa, Artificial
  helical interface sequence
DKELTAMLKE

SEQ ID NO: 12386 - protein, 10 aa, Artificial
  helical interface sequence
DKELTAMLKE

SEQ ID NO: 12387 - protein, 19 aa, Artificial
  helical interface sequence
PASYENVRAKWFPEVRHHC

SEQ ID NO: 12388 - protein, 11 aa, Artificial
  helical interface sequence
KKWIQKVIDQF

SEQ ID NO: 12389 - protein, 5 aa, Artificial
  helical interface sequence
ECENG

SEQ ID NO: 12390 - protein, 15 aa, Artificial
  helical interface sequence
AGKNRETIAAQFAQG

SEQ ID NO: 12391 - protein, 8 aa, Artificial
  helical interface sequence
GCSEALLR

SEQ ID NO: 12392 - protein, 16 aa, Artificial
  helical interface sequence
RPRKRLMELLLRTATE

SEQ ID NO: 12393 - protein, 20 aa, Artificial
  helical interface sequence
EELLQVVQRIHELRTLAGYR

SEQ ID NO: 12394 - protein, 12 aa, Artificial
  helical interface sequence
PYFRSYFAAINF

SEQ ID NO: 12395 - protein, 20 aa, Artificial
  helical interface sequence
AEVVEWVHRIFDQRTKFGFQ

SEQ ID NO: 12396 - protein, 11 aa, Artificial
  helical interface sequence
SVAANRRKHMS

SEQ ID NO: 12397 - protein, 16 aa, Artificial
  helical interface sequence
VFKIKNRMKDVMDDNV

SEQ ID NO: 12398 - protein, 16 aa, Artificial
  helical interface sequence
VFKIKNRMKDVMDDNV

SEQ ID NO: 12399 - protein, 16 aa, Artificial
  helical interface sequence
VFKIKNRMKDVMDDNV

SEQ ID NO: 12400 - protein, 13 aa, Artificial
  helical interface sequence
IFIVLNMIRETYD

SEQ ID NO: 12401 - protein, 13 aa, Artificial
  helical interface sequence
TCVEWLSRYLELG

SEQ ID NO: 12402 - protein, 13 aa, Artificial
  helical interface sequence
FAAQITRNKWERA

SEQ ID NO: 12403 - protein, 10 aa, Artificial
  helical interface sequence
PLVSDVLRAL

SEQ ID NO: 12404 - protein, 7 aa, Artificial
  helical interface sequence
EELNKLL

SEQ ID NO: 12405 - protein, 12 aa, Artificial
  helical interface sequence
SREIQTAVRLLL

SEQ ID NO: 12406 - protein, 14 aa, Artificial
  helical interface sequence
GTLTYEAVHQTTQV

SEQ ID NO: 12407 - protein, 14 aa, Artificial
  helical interface sequence
GNKRLDAVNYIVSN

SEQ ID NO: 12408 - protein, 10 aa, Artificial
  helical interface sequence
VGRIHRHLKS

SEQ ID NO: 12409 - protein, 6 aa, Artificial
  helical interface sequence
FAERIL

SEQ ID NO: 12410 - protein, 13 aa, Artificial
  helical interface sequence
QLQTELLAALLES

SEQ ID NO: 12411 - protein, 13 aa, Artificial
  helical interface sequence
QLQTELLAALLES

SEQ ID NO: 12412 - protein, 17 aa, Artificial
  helical interface sequence
MTEKALAEIVDEARNRW

SEQ ID NO: 12413 - protein, 11 aa, Artificial
  helical interface sequence
FVRYVQGLKKK

SEQ ID NO: 12414 - protein, 13 aa, Artificial
  helical interface sequence
FQVEYAVKAVENG

SEQ ID NO: 12415 - protein, 9 aa, Artificial
  helical interface sequence
LPELLKVSG

SEQ ID NO: 12416 - protein, 8 aa, Artificial
  helical interface sequence
PEEIRKTF

SEQ ID NO: 12417 - protein, 10 aa, Artificial
  helical interface sequence
DELLLGIFSC

SEQ ID NO: 12418 - protein, 19 aa, Artificial
  helical interface sequence
LNINLFKKLLAEMKTWTDK

SEQ ID NO: 12419 - protein, 10 aa, Artificial
  helical interface sequence
DELLLGIFSC

SEQ ID NO: 12420 - protein, 10 aa, Artificial
  helical interface sequence
WNESAFSVHA

SEQ ID NO: 12421 - protein, 20 aa, Artificial
  helical interface sequence
ISDMQHIERLLKDLVTENAY

SEQ ID NO: 12422 - protein, 22 aa, Artificial
  helical interface sequence
AADTEAVTQLIGSNIELHSLYT

SEQ ID NO: 12423 - protein, 19 aa, Artificial
  helical interface sequence
KEETVDFIKHSLSQAIKWD

SEQ ID NO: 12424 - protein, 7 aa, Artificial
  helical interface sequence
EKDIVFG

SEQ ID NO: 12425 - protein, 15 aa, Artificial
  helical interface sequence
AGRGVITAINFLEEE

SEQ ID NO: 12426 - protein, 45 aa, Artificial; identical to SEQ ID NO: 5362
  helical interface sequence

SEQ ID NO: 12427 - protein, 16 aa, Artificial
  helical interface sequence
ADAFTLFELFERKLEM

SEQ ID NO: 12428 - protein, 19 aa, Artificial
  helical interface sequence
PHIQGIWDKFFEVVIDAIS

SEQ ID NO: 12429 - protein, 7 aa, Artificial
  helical interface sequence
TYGAERM

SEQ ID NO: 12430 - protein, 14 aa, Artificial
  helical interface sequence
GHFIPQLSQVVYRN

SEQ ID NO: 12431 - protein, 14 aa, Artificial
  helical interface sequence
DHEDMIGMFESWWH

SEQ ID NO: 12432 - protein, 16 aa, Artificial
  helical interface sequence
IAPFLQEIGEAAKNAG

SEQ ID NO: 12433 - protein, 13 aa, Artificial
  helical interface sequence
PISFKWVMRAKDK

SEQ ID NO: 12434 - protein, 6 aa, Artificial
  helical interface sequence
LEIILK

SEQ ID NO: 12435 - protein, 5 aa, Artificial
  helical interface sequence
PKELN

SEQ ID NO: 12436 - protein, 6 aa, Artificial
  helical interface sequence
PEFADW

SEQ ID NO: 12437 - protein, 18 aa, Artificial
  helical interface sequence
PYAAQLAALDAAKKAMAY

SEQ ID NO: 12438 - protein, 19 aa, Artificial
  helical interface sequence
PVNFKFLGHCFLVVVAIHH

SEQ ID NO: 12439 - protein, 19 aa, Artificial
  helical interface sequence
PVNFKFLGHCFLVVVAIHH

SEQ ID NO: 12440 - protein, 21 aa, Artificial
  helical interface sequence
KTHYHAMHADCLQELRRYLKS

SEQ ID NO: 12441 - protein, 13 aa, Artificial
  helical interface sequence
WFIQSLCAMLKQY

SEQ ID NO: 12442 - protein, 19 aa, Artificial
  helical interface sequence
IEAGRAALYKEVYNVIASD

SEQ ID NO: 12443 - protein, 12 aa, Artificial
  helical interface sequence
ELGRPDAENWNS

SEQ ID NO: 12444 - protein, 11 aa, Artificial
  helical interface sequence
RSEWDILLKDV

SEQ ID NO: 12445 - protein, 16 aa, Artificial
  helical interface sequence
INVVTCAAGILSNLTC

SEQ ID NO: 12446 - protein, 14 aa, Artificial
  helical interface sequence
ELGRPDAEYWNKQY

SEQ ID NO: 12447 - protein, 5 aa, Artificial
  helical interface sequence
FHRKK

SEQ ID NO: 12448 - protein, 11 aa, Artificial
  helical interface sequence
LEEAQRIWKQK

SEQ ID NO: 12449 - protein, 21 aa, Artificial
  helical interface sequence
NAPGAAANRVALEACTQARNE

SEQ ID NO: 12450 - protein, 14 aa, Artificial
  helical interface sequence
AKNYGRAVYECLRG

SEQ ID NO: 12451 - protein, 15 aa, Artificial
  helical interface sequence
VAAASKLLANMVYQY

SEQ ID NO: 12452 - protein, 15 aa, Artificial
  helical interface sequence
LKHLADRVAMYVHAY

SEQ ID NO: 12453 - protein, 15 aa, Artificial
  helical interface sequence
VAAASKLLANMVYQY

SEQ ID NO: 12454 - protein, 13 aa, Artificial
  helical interface sequence
IEGRNAAYEAIIK

SEQ ID NO: 12455 - protein, 15 aa, Artificial
  helical interface sequence
PAAVLFEINACRKAR

SEQ ID NO: 12456 - protein, 11 aa, Artificial
  helical interface sequence
GLDIVGALSRS

SEQ ID NO: 12457 - protein, 10 aa, Artificial
  helical interface sequence
MIDRFIADYA

SEQ ID NO: 12458 - protein, 12 aa, Artificial
  helical interface sequence
DQQLDCALDLMR

SEQ ID NO: 12459 - protein, 5 aa, Artificial
  helical interface sequence
VLAAW

SEQ ID NO: 12460 - protein, 5 aa, Artificial
  helical interface sequence
WKQYV

SEQ ID NO: 12461 - protein, 27 aa, Artificial
  helical interface sequence
ANLGGLISGIALILVATACLAAYGLVS

SEQ ID NO: 12462 - protein, 21 aa, Artificial
  helical interface sequence
FRTFWAVLLLAINFLVAAYYF

SEQ ID NO: 12463 - protein, 15 aa, Artificial
  helical interface sequence
KEQCLALAAQQLRPR

SEQ ID NO: 12464 - protein, 11 aa, Artificial
  helical interface sequence
YQVEYAFKATN

SEQ ID NO: 12465 - protein, 19 aa, Artificial
  helical interface sequence
KEETVDFIKHSLSQAIKWD

SEQ ID NO: 12466 - protein, 12 aa, Artificial
  helical interface sequence
PEHVIQALESLG

SEQ ID NO: 12467 - protein, 9 aa, Artificial
  helical interface sequence
AGKITGMLL

SEQ ID NO: 12468 - protein, 13 aa, Artificial
  helical interface sequence
HEIWAAYKKVEAS

SEQ ID NO: 12469 - protein, 9 aa, Artificial
  helical interface sequence
VEKIRYALG

SEQ ID NO: 12470 - protein, 12 aa, Artificial
  helical interface sequence
LEDYVRYVTLDM

SEQ ID NO: 12471 - protein, 10 aa, Artificial
  helical interface sequence
YKNKMMVCQV

SEQ ID NO: 12472 - protein, 20 aa, Artificial
  helical interface sequence
AAYRMNAAQAMALRYVRELS

SEQ ID NO: 12473 - protein, 11 aa, Artificial
  helical interface sequence
LEELRSLFSSA

SEQ ID NO: 12474 - protein, 19 aa, Artificial
  helical interface sequence
PAVHASLDKFLASVSTVLT

SEQ ID NO: 12475 - protein, 29 aa, Artificial
  helical interface sequence
LHWRAAGAATVLLVIVLLAGSYLAVLAER

SEQ ID NO: 12476 - protein, 13 aa, Artificial
  helical interface sequence
SRLAEIISNILNE

SEQ ID NO: 12477 - protein, 23 aa, Artificial
  helical interface sequence
DAWGKQLEMLREVGQRLRLELAD

SEQ ID NO: 12478 - protein, 26 aa, Artificial
  helical interface sequence
TDLLYTIELGHGLNVAECMAHSAMAR

SEQ ID NO: 12479 - protein, 7 aa, Artificial
  helical interface sequence
KEETQQK

SEQ ID NO: 12480 - protein, 29 aa, Artificial
  helical interface sequence
FIGRVFLFLMIVLPLWCGLHRMHHAMHDL

SEQ ID NO: 12481 - protein, 13 aa, Artificial
  helical interface sequence
EEIVMHIPELADE

SEQ ID NO: 12482 - protein, 29 aa, Artificial
  helical interface sequence
SKAMSIMNSFVNDVFERIAGEASRLAHYN

SEQ ID NO: 12483 - protein, 12 aa, Artificial
  helical interface sequence
ALKLVRESELLG

SEQ ID NO: 12484 - protein, 14 aa, Artificial
  helical interface sequence
LGLYNEAVKIIHDF

SEQ ID NO: 12485 - protein, 5 aa, Artificial
  helical interface sequence
LKEFV

SEQ ID NO: 12486 - protein, 11 aa, Artificial
  helical interface sequence
QSAWFYHRWLL

SEQ ID NO: 12487 - protein, 37 aa, Artificial; identical to SEQ ID NO: 622
  helical interface sequence

SEQ ID NO: 12488 - protein, 12 aa, Artificial
  helical interface sequence
FTVFLTMFGEKL

SEQ ID NO: 12489 - protein, 7 aa, Artificial
  helical interface sequence
CLSETLG

SEQ ID NO: 12490 - protein, 13 aa, Artificial
  helical interface sequence
MVKTAAAFGAIFT

SEQ ID NO: 12491 - protein, 30 aa, Artificial; identical to SEQ ID NO: 2910
  helical interface sequence

SEQ ID NO: 12492 - protein, 13 aa, Artificial
  helical interface sequence
MVKTAAAFGAIFT

SEQ ID NO: 12493 - protein, 11 aa, Artificial
  helical interface sequence
DTRDAWVNKIA

SEQ ID NO: 12494 - protein, 7 aa, Artificial
  helical interface sequence
SEQLTSG

SEQ ID NO: 12495 - protein, 8 aa, Artificial
  helical interface sequence
LSEVIAEL

SEQ ID NO: 12496 - protein, 6 aa, Artificial
  helical interface sequence
ADFLLE

SEQ ID NO: 12497 - protein, 15 aa, Artificial
  helical interface sequence
EEQIAEFKEAFSLFD

SEQ ID NO: 12498 - protein, 7 aa, Artificial
  helical interface sequence
PFTWDAV

SEQ ID NO: 12499 - protein, 22 aa, Artificial
  helical interface sequence
KDYYRILRKTALAVSEKMVEKE

SEQ ID NO: 12500 - protein, 8 aa, Artificial
  helical interface sequence
YAQALQSV

SEQ ID NO: 12501 - protein, 20 aa, Artificial
  helical interface sequence
ENLYDDRVFRIKRALDLSMR

SEQ ID NO: 12502 - protein, 12 aa, Artificial
  helical interface sequence
SVWIGGSILASL

SEQ ID NO: 12503 - protein, 8 aa, Artificial
  helical interface sequence
NICYVITH

SEQ ID NO: 12504 - protein, 13 aa, Artificial
  helical interface sequence
MVKTAAAFGAIFT

SEQ ID NO: 12505 - protein, 30 aa, Artificial; identical to SEQ ID NO: 2910
  helical interface sequence

SEQ ID NO: 12506 - protein, 20 aa, Artificial
  helical interface sequence
TRNCWQNYLDFHRCEKAMTA

SEQ ID NO: 12507 - protein, 28 aa, Artificial
  helical interface sequence
SLSISALLAVTVFLLLLADKVPETSLSV

SEQ ID NO: 12508 - protein, 16 aa, Artificial
  helical interface sequence
IDEIGPLALARVLIVY

SEQ ID NO: 12509 - protein, 19 aa, Artificial
  helical interface sequence
DNFRVLADVLTIVIAAKFG

SEQ ID NO: 12510 - protein, 15 aa, Artificial
  helical interface sequence
IWPHIDWLTAFSIRY

SEQ ID NO: 12511 - protein, 23 aa, Artificial
  helical interface sequence
AGIAIELVRLFAVELEHYEKIEG

SEQ ID NO: 12512 - protein, 7 aa, Artificial
  helical interface sequence
FTDYLRG

SEQ ID NO: 12513 - protein, 12 aa, Artificial
  helical interface sequence
EIVMHIPELADE

SEQ ID NO: 12514 - protein, 16 aa, Artificial
  helical interface sequence
IYPRESNHVMRHLYRQ

SEQ ID NO: 12515 - protein, 8 aa, Artificial
  helical interface sequence
DKELTAML

SEQ ID NO: 12516 - protein, 26 aa, Artificial
  helical interface sequence
YKKLQDQRIGLSVIQRNIRKWLVLRN

SEQ ID NO: 12517 - protein, 32 aa, Artificial; identical to SEQ ID NO: 1328
  helical interface sequence

SEQ ID NO: 12518 - protein, 9 aa, Artificial
  helical interface sequence
RPDAENWNS

SEQ ID NO: 12519 - protein, 5 aa, Artificial
  helical interface sequence
EEFAK

SEQ ID NO: 12520 - protein, 14 aa, Artificial
  helical interface sequence
AKNYGRAVYECLRG

SEQ ID NO: 12521 - protein, 23 aa, Artificial
  helical interface sequence
VKPIEDIQDNLLQALELQLKLNH

SEQ ID NO: 12522 - protein, 15 aa, Artificial
  helical interface sequence
PETFTQLVSSSLYER

SEQ ID NO: 12523 - protein, 19 aa, Artificial
  helical interface sequence
TEEGLDLLKLCVQELEKRM

SEQ ID NO: 12524 - protein, 18 aa, Artificial
  helical interface sequence
PSYIFEYLATVMYQRRSK

SEQ ID NO: 12525 - protein, 7 aa, Artificial
  helical interface sequence
DEQLKSG

SEQ ID NO: 12526 - protein, 5 aa, Artificial
  helical interface sequence
IMGVM

SEQ ID NO: 12527 - protein, 19 aa, Artificial
  helical interface sequence
LVADGVFYAELNEFFTREL

SEQ ID NO: 12528 - protein, 8 aa, Artificial
  helical interface sequence
ETITYVFI

SEQ ID NO: 12529 - protein, 20 aa, Artificial
  helical interface sequence
LFVPVTGLWMSAIGVVGLAL

SEQ ID NO: 12530 - protein, 10 aa, Artificial
  helical interface sequence
LLDYLRETVG

SEQ ID NO: 12531 - protein, 10 aa, Artificial
  helical interface sequence
LLDYLRETVG

SEQ ID NO: 12532 - protein, 19 aa, Artificial
  helical interface sequence
VPTASLWGAVGAVGLVWAT

SEQ ID NO: 12533 - protein, 14 aa, Artificial
  helical interface sequence
WEEIPALDKELKAK

SEQ ID NO: 12534 - protein, 19 aa, Artificial
  helical interface sequence
EETRVHLLTKLADIEYSIS

SEQ ID NO: 12535 - protein, 17 aa, Artificial
  helical interface sequence
FRRIARLVGVLREWAYR

SEQ ID NO: 12536 - protein, 18 aa, Artificial
  helical interface sequence
EVTDMMQKALFDFLKHRF

SEQ ID NO: 12537 - protein, 22 aa, Artificial
  helical interface sequence
PMIVEGQIRGGIAQAIGQTLLE

SEQ ID NO: 12538 - protein, 25 aa, Artificial
  helical interface sequence
RDLRLSLAKAITQRVILKAAQGAMY

SEQ ID NO: 12539 - protein, 13 aa, Artificial
  helical interface sequence
ACEIRALARQWAK

SEQ ID NO: 12540 - protein, 6 aa, Artificial
  helical interface sequence
RCAHNC

SEQ ID NO: 12541 - protein, 9 aa, Artificial
  helical interface sequence
MGFTIMENF

SEQ ID NO: 12542 - protein, 23 aa, Artificial
  helical interface sequence
MDELTEIKTVVSEAVTNAIIHGY

SEQ ID NO: 12543 - protein, 17 aa, Artificial
  helical interface sequence
QAGGLDALGHARRTIRR

SEQ ID NO: 12544 - protein, 33 aa, Artificial; identical to SEQ ID NO: 7149
  helical interface sequence

SEQ ID NO: 12545 - protein, 6 aa, Artificial
  helical interface sequence
LAPMYY

SEQ ID NO: 12546 - protein, 12 aa, Artificial
  helical interface sequence
SREVQTAVRLLL

SEQ ID NO: 12547 - protein, 46 aa, Artificial
  helical interface sequence
VPARDYLIDGSRGILSGTSDLLLTFDEAEVRKIIRVCKGILEYLTV

SEQ ID NO: 12548 - protein, 17 aa, Artificial
  helical interface sequence
NNAFRQFVIGVTGYAKQ

SEQ ID NO: 12549 - protein, 12 aa, Artificial
  helical interface sequence
TAWTVGRICELL

SEQ ID NO: 12550 - protein, 14 aa, Artificial
  helical interface sequence
DEQIAAQVDYIVAN

SEQ ID NO: 12551 - protein, 29 aa, Artificial
  helical interface sequence
RKHMLQALFITITLGVYFTLLQASEYYEA

SEQ ID NO: 12552 - protein, 25 aa, Artificial
  helical interface sequence
PNRVKWMIAFICLVMLAQLMLILKK

SEQ ID NO: 12553 - protein, 25 aa, Artificial
  helical interface sequence
PNRVKWMIAFICLVMLAQLMLILKK

SEQ ID NO: 12554 - protein, 12 aa, Artificial
  helical interface sequence
TLFAAGNYAYAH

SEQ ID NO: 12555 - protein, 6 aa, Artificial
  helical interface sequence
HWKNQF

SEQ ID NO: 12556 - protein, 5 aa, Artificial
  helical interface sequence
GEFLT

SEQ ID NO: 12557 - protein, 5 aa, Artificial
  helical interface sequence
IFERS

SEQ ID NO: 12558 - protein, 8 aa, Artificial
  helical interface sequence
PVVQALAA

SEQ ID NO: 12559 - protein, 19 aa, Artificial
  helical interface sequence
QGALRLMWELGEYLKALTG

SEQ ID NO: 12560 - protein, 5 aa, Artificial
  helical interface sequence
IFERS

SEQ ID NO: 12561 - protein, 23 aa, Artificial
  helical interface sequence
PNLLKMIRHTTNLTLWFEKCIVE

SEQ ID NO: 12562 - protein, 13 aa, Artificial
  helical interface sequence
FGIYLTNILKTEE

SEQ ID NO: 12563 - protein, 9 aa, Artificial
  helical interface sequence
IYAIWSDLQ

SEQ ID NO: 12564 - protein, 16 aa, Artificial
  helical interface sequence
IFDRVLTELVSKMRDM

SEQ ID NO: 12565 - protein, 11 aa, Artificial
  helical interface sequence
RICLRELAHKG

SEQ ID NO: 12566 - protein, 16 aa, Artificial
  helical interface sequence
DSQKKAIERMKDTLRI

SEQ ID NO: 12567 - protein, 12 aa, Artificial
  helical interface sequence
IEDQISLLKGAA

SEQ ID NO: 12568 - protein, 23 aa, Artificial
  helical interface sequence
VADARVLVDFARISAQQEKVTYG

SEQ ID NO: 12569 - protein, 23 aa, Artificial
  helical interface sequence
VADARVLVDFARISAQQEKVTYG

SEQ ID NO: 12570 - protein, 26 aa, Artificial
  helical interface sequence
DGDRELMKELFDQCENKRRTLFKLAS

SEQ ID NO: 12571 - protein, 18 aa, Artificial
  helical interface sequence
PLLQGRLFSYTDTQISRL

SEQ ID NO: 12572 - protein, 7 aa, Artificial
  helical interface sequence
FFAENEQ

SEQ ID NO: 12573 - protein, 8 aa, Artificial
  helical interface sequence
PSHIIEFY

SEQ ID NO: 12574 - protein, 34 aa, Artificial; identical to SEQ ID NO: 1952
  helical interface sequence

SEQ ID NO: 12575 - protein, 16 aa, Artificial
  helical interface sequence
MLERAKVKDEWAKAYG

SEQ ID NO: 12576 - protein, 15 aa, Artificial
  helical interface sequence
PLQRLKVKRQWAEAY

SEQ ID NO: 12577 - protein, 28 aa, Artificial
  helical interface sequence
EEFSNTIDELSTDIILKTRQINKLIDSL

SEQ ID NO: 12578 - protein, 22 aa, Artificial
  helical interface sequence
EKTARLLDALKYYGFTLSTTSG

SEQ ID NO: 12579 - protein, 26 aa, Artificial
  helical interface sequence
AASLHWTSERAVSALLLGLLPAAYLY

SEQ ID NO: 12580 - protein, 14 aa, Artificial
  helical interface sequence
YSGIVSGIEWATTN

SEQ ID NO: 12581 - protein, 16 aa, Artificial
  helical interface sequence
LSLALYVFDEYLQKTV

SEQ ID NO: 12582 - protein, 16 aa, Artificial
  helical interface sequence
LSLALYVFDEYLQKTV

SEQ ID NO: 12583 - protein, 21 aa, Artificial
  helical interface sequence
IPDARNAALRAKAEAAEFRYK

SEQ ID NO: 12584 - protein, 22 aa, Artificial
  helical interface sequence
AADGDALVKRFKNSVKWYHFDH

SEQ ID NO: 12585 - protein, 21 aa, Artificial
  helical interface sequence
NADSRILIEKARVEAQSHRLT

SEQ ID NO: 12586 - protein, 15 aa, Artificial
  helical interface sequence
TETAASVFKELCYEN

SEQ ID NO: 12587 - protein, 19 aa, Artificial
  helical interface sequence
PVNFKLLSHCLLVTLAAHL

SEQ ID NO: 12588 - protein, 12 aa, Artificial
  helical interface sequence
SREIQTAVRLLL

SEQ ID NO: 12589 - protein, 12 aa, Artificial
  helical interface sequence
SREIQTAVRLLL

SEQ ID NO: 12590 - protein, 12 aa, Artificial
  helical interface sequence
SREIQTAVRLLL

SEQ ID NO: 12591 - protein, 29 aa, Artificial
  helical interface sequence
AGAPVYLAAVLEYLTAEILELAGNWERDN

SEQ ID NO: 12592 - protein, 26 aa, Artificial
  helical interface sequence
AASLHWTGERVVSVLLLGLLPAAYLN

SEQ ID NO: 12593 - protein, 11 aa, Artificial
  helical interface sequence
IGPSIQAWLLG

SEQ ID NO: 12594 - protein, 13 aa, Artificial
  helical interface sequence
PQKARRLFDVLHE

SEQ ID NO: 12595 - protein, 8 aa, Artificial
  helical interface sequence
FSLYQDVV

SEQ ID NO: 12596 - protein, 7 aa, Artificial
  helical interface sequence
PWAREGA

SEQ ID NO: 12597 - protein, 30 aa, Artificial
  helical interface sequence
AFTKVFTLLALFSILIHAWIGMWQVLTDYV

SEQ ID NO: 12598 - protein, 5 aa, Artificial
  helical interface sequence
HTWLH

SEQ ID NO: 12599 - protein, 12 aa, Artificial
  helical interface sequence
DALNNIINNARD

SEQ ID NO: 12600 - protein, 6 aa, Artificial
  helical interface sequence
GPCKMI

SEQ ID NO: 12601 - protein, 6 aa, Artificial
  helical interface sequence
GPCKMI

SEQ ID NO: 12602 - protein, 16 aa, Artificial
  helical interface sequence
MAHLKGAIYELAQALF

SEQ ID NO: 12603 - protein, 9 aa, Artificial
  helical interface sequence
PEYANRLLG

SEQ ID NO: 12604 - protein, 16 aa, Artificial
  helical interface sequence
LRERIEFLNEASVMKG

SEQ ID NO: 12605 - protein, 14 aa, Artificial
  helical interface sequence
TFPFFVVGVVHLIS

SEQ ID NO: 12606 - protein, 10 aa, Artificial
  helical interface sequence
LKPLEEVLNL

SEQ ID NO: 12607 - protein, 18 aa, Artificial
  helical interface sequence
YPASRAALVAQNYINYQQ

SEQ ID NO: 12608 - protein, 16 aa, Artificial
  helical interface sequence
VFKIKNRMKDVMDDNV

SEQ ID NO: 12609 - protein, 7 aa, Artificial
  helical interface sequence
EDFFPLS

SEQ ID NO: 12610 - protein, 21 aa, Artificial
  helical interface sequence
PYERANLLRFMMKAWKLVEKY

SEQ ID NO: 12611 - protein, 7 aa, Artificial
  helical interface sequence
VAAALRR

SEQ ID NO: 12612 - protein, 7 aa, Artificial
  helical interface sequence
DGVFQLL

SEQ ID NO: 12613 - protein, 11 aa, Artificial
  helical interface sequence
LGALAEASLTC

SEQ ID NO: 12614 - protein, 11 aa, Artificial
  helical interface sequence
ADALRRELANY

SEQ ID NO: 12615 - protein, 23 aa, Artificial
  helical interface sequence
SEFQAHSLRVLGGLDMCVASLDD

SEQ ID NO: 12616 - protein, 16 aa, Artificial
  helical interface sequence
KEKALENYRQIKEFIK

SEQ ID NO: 12617 - protein, 12 aa, Artificial
  helical interface sequence
DELSLRALQATG

SEQ ID NO: 12618 - protein, 10 aa, Artificial
  helical interface sequence
PSTIEKLAKN

SEQ ID NO: 12619 - protein, 12 aa, Artificial
  helical interface sequence
AELVDALQFVCG

SEQ ID NO: 12620 - protein, 10 aa, Artificial
  helical interface sequence
PNYRRRLVRW

SEQ ID NO: 12621 - protein, 16 aa, Artificial
  helical interface sequence
DFEILEMAVRELAIEK

SEQ ID NO: 12622 - protein, 16 aa, Artificial
  helical interface sequence
DFEILEMAVRELAIEK

SEQ ID NO: 12623 - protein, 6 aa, Artificial
  helical interface sequence
RDCLIG

SEQ ID NO: 12624 - protein, 8 aa, Artificial
  helical interface sequence
KADVERLR

SEQ ID NO: 12625 - protein, 19 aa, Artificial
  helical interface sequence
EEELDSAGDGLEKYVMTKL

SEQ ID NO: 12626 - protein, 35 aa, Artificial; identical to SEQ ID NO: 1058
  helical interface sequence

SEQ ID NO: 12627 - protein, 10 aa, Artificial
  helical interface sequence
LWLAINLKQR

SEQ ID NO: 12628 - protein, 14 aa, Artificial
  helical interface sequence
AGELIAEAALALEM

SEQ ID NO: 12629 - protein, 6 aa, Artificial
  helical interface sequence
RPRLKE

SEQ ID NO: 12630 - protein, 20 aa, Artificial
  helical interface sequence
RAQLVDMKRLEVDIDIKIRS

SEQ ID NO: 12631 - protein, 14 aa, Artificial
  helical interface sequence
FAGKINRLAIMVRG

SEQ ID NO: 12632 - protein, 17 aa, Artificial
  helical interface sequence
QPAGLQAAEAAVDAIKG

SEQ ID NO: 12633 - protein, 17 aa, Artificial
  helical interface sequence
QPAGLQAAEAAVDAIKG

SEQ ID NO: 12634 - protein, 11 aa, Artificial
  helical interface sequence
EDLKRRILSSH

SEQ ID NO: 12635 - protein, 52 aa, Artificial; identical to SEQ ID NO: 499
  helical interface sequence

SEQ ID NO: 12636 - protein, 23 aa, Artificial
  helical interface sequence
KESTQKAIDGVTNKVNSIIDKMN

SEQ ID NO: 12637 - protein, 6 aa, Artificial
  helical interface sequence
LEMILK

SEQ ID NO: 12638 - protein, 6 aa, Artificial
  helical interface sequence
LEMILK

SEQ ID NO: 12639 - protein, 6 aa, Artificial
  helical interface sequence
LEMILK

SEQ ID NO: 12640 - protein, 6 aa, Artificial
  helical interface sequence
LEMILK

SEQ ID NO: 12641 - protein, 6 aa, Artificial
  helical interface sequence
LEMILK

SEQ ID NO: 12642 - protein, 6 aa, Artificial
  helical interface sequence
LEMILK

SEQ ID NO: 12643 - protein, 16 aa, Artificial
  helical interface sequence
EKDVENLEALLPLIEG

SEQ ID NO: 12644 - protein, 15 aa, Artificial
  helical interface sequence
ILTILTEVNYEVSNK

SEQ ID NO: 12645 - protein, 11 aa, Artificial
  helical interface sequence
IGHSIQTWLLG

SEQ ID NO: 12646 - protein, 7 aa, Artificial
  helical interface sequence
IEEDFNA

SEQ ID NO: 12647 - protein, 6 aa, Artificial
  helical interface sequence
SEQLTS

SEQ ID NO: 12648 - protein, 5 aa, Artificial
  helical interface sequence
SMVQH

SEQ ID NO: 12649 - protein, 8 aa, Artificial
  helical interface sequence
GYHVGWTH

SEQ ID NO: 12650 - protein, 16 aa, Artificial
  helical interface sequence
INVVTCAAGILSNLTC

SEQ ID NO: 12651 - protein, 10 aa, Artificial
  helical interface sequence
YKNKMMVCQV

SEQ ID NO: 12652 - protein, 17 aa, Artificial
  helical interface sequence
WPLIKATVGLIRNLALC

SEQ ID NO: 12653 - protein, 19 aa, Artificial
  helical interface sequence
PEFGAHSQRVLSGLDITIS

SEQ ID NO: 12654 - protein, 14 aa, Artificial
  helical interface sequence
PDMLAAQLAHLKVQ

SEQ ID NO: 12655 - protein, 13 aa, Artificial
  helical interface sequence
NHAIVQTLVNSVN

SEQ ID NO: 12656 - protein, 8 aa, Artificial
  helical interface sequence
LKWIDRSM

SEQ ID NO: 12657 - protein, 7 aa, Artificial
  helical interface sequence
AELFYKG

SEQ ID NO: 12658 - protein, 26 aa, Artificial
  helical interface sequence
LLQKNVRAQLVDMKRLEVDIDIKIRS

SEQ ID NO: 12659 - protein, 14 aa, Artificial
  helical interface sequence
SYCTMAKKLFHDMN

SEQ ID NO: 12660 - protein, 11 aa, Artificial
  helical interface sequence
SARVSELMNES

SEQ ID NO: 12661 - protein, 16 aa, Artificial
  helical interface sequence
PEMIKLQEVFKAFYLG

SEQ ID NO: 12662 - protein, 17 aa, Artificial
  helical interface sequence
DRQYQIDAAIVRIMKMR

SEQ ID NO: 12663 - protein, 9 aa, Artificial
  helical interface sequence
IDTILSSKL

SEQ ID NO: 12664 - protein, 22 aa, Artificial
  helical interface sequence
TVQCWSETLAYDCALMNTALET

SEQ ID NO: 12665 - protein, 22 aa, Artificial
  helical interface sequence
TVQCWSETLAYDCALMNTALET

SEQ ID NO: 12666 - protein, 5 aa, Artificial
  helical interface sequence
RQITQ

SEQ ID NO: 12667 - protein, 21 aa, Artificial
  helical interface sequence
QGALANIAVDKANLEIMTKRS

SEQ ID NO: 12668 - protein, 7 aa, Artificial
  helical interface sequence
EEFGRFA

SEQ ID NO: 12669 - protein, 6 aa, Artificial
  helical interface sequence
LYKTFF

SEQ ID NO: 12670 - protein, 10 aa, Artificial
  helical interface sequence
YGAYVGNRAK

SEQ ID NO: 12671 - protein, 7 aa, Artificial
  helical interface sequence
GHIARRF

SEQ ID NO: 12672 - protein, 11 aa, Artificial
  helical interface sequence
KPAIRRLARRG

SEQ ID NO: 12673 - protein, 17 aa, Artificial
  helical interface sequence
SHVLSKVCMYFTYKVRY

SEQ ID NO: 12674 - protein, 16 aa, Artificial
  helical interface sequence
LTELLQGYTVEVLRQQ

SEQ ID NO: 12675 - protein, 24 aa, Artificial
  helical interface sequence
FRKARETLFAAGNYAYAHRKRRKR

SEQ ID NO: 12676 - protein, 5 aa, Artificial
  helical interface sequence
CADCH

SEQ ID NO: 12677 - protein, 12 aa, Artificial
  helical interface sequence
IENVKAKIQDKE

SEQ ID NO: 12678 - protein, 5 aa, Artificial
  helical interface sequence
ERKYR

SEQ ID NO: 12679 - protein, 10 aa, Artificial
  helical interface sequence
WVDWWQWWVK

SEQ ID NO: 12680 - protein, 15 aa, Artificial
  helical interface sequence
TREGNDLYHEMIESG

SEQ ID NO: 12681 - protein, 7 aa, Artificial
  helical interface sequence
PAVFLRD

SEQ ID NO: 12682 - protein, 17 aa, Artificial
  helical interface sequence
PYVRKTAAVCVAKLHDI

SEQ ID NO: 12683 - protein, 12 aa, Artificial
  helical interface sequence
FQVARRVLNNLQ

SEQ ID NO: 12684 - protein, 11 aa, Artificial
  helical interface sequence
KAVWHKLLSKQ

SEQ ID NO: 12685 - protein, 11 aa, Artificial
  helical interface sequence
AMDVVYALKRQ

SEQ ID NO: 12686 - protein, 29 aa, Artificial
  helical interface sequence
SKAMSIMNSFVNDIFERIAAEASRLAHYN

SEQ ID NO: 12687 - protein, 12 aa, Artificial
  helical interface sequence
SREIQTAVRLLL

SEQ ID NO: 12688 - protein, 14 aa, Artificial
  helical interface sequence
GTLTYEAVKQTTDY

SEQ ID NO: 12689 - protein, 11 aa, Artificial
  helical interface sequence
STTMRRLIDTY

SEQ ID NO: 12690 - protein, 10 aa, Artificial
  helical interface sequence
FTSRTSACGL

SEQ ID NO: 12691 - protein, 12 aa, Artificial
  helical interface sequence
SREIQTAVRLLL

SEQ ID NO: 12692 - protein, 10 aa, Artificial
  helical interface sequence
VGRVHRLLRK

SEQ ID NO: 12693 - protein, 8 aa, Artificial
  helical interface sequence
KILHRLLQ

SEQ ID NO: 12694 - protein, 11 aa, Artificial
  helical interface sequence
YREVQRIRHEF

SEQ ID NO: 12695 - protein, 5 aa, Artificial
  helical interface sequence
IVEQC

SEQ ID NO: 12696 - protein, 13 aa, Artificial
  helical interface sequence
PLRVFFTVSLPLS

SEQ ID NO: 12697 - protein, 6 aa, Artificial
  helical interface sequence
KLYAKV

SEQ ID NO: 12698 - protein, 15 aa, Artificial
  helical interface sequence
VADMLVKVNALIKDR

SEQ ID NO: 12699 - protein, 12 aa, Artificial
  helical interface sequence
ACHLRKATCLLG

SEQ ID NO: 12700 - protein, 18 aa, Artificial
  helical interface sequence
GGLINKKCYEMASHLRRS

SEQ ID NO: 12701 - protein, 15 aa, Artificial
  helical interface sequence
AATLEEKLNKIFEKL

SEQ ID NO: 12702 - protein, 8 aa, Artificial
  helical interface sequence
PDEIRKMS

SEQ ID NO: 12703 - protein, 6 aa, Artificial
  helical interface sequence
VPMRER

SEQ ID NO: 12704 - protein, 22 aa, Artificial
  helical interface sequence
LERTRAELDTVCRYNYEETEVP

SEQ ID NO: 12705 - protein, 9 aa, Artificial
  helical interface sequence
MFSHLRRIG

SEQ ID NO: 12706 - protein, 13 aa, Artificial
  helical interface sequence
EEIVMHIPELADE

SEQ ID NO: 12707 - protein, 29 aa, Artificial
  helical interface sequence
RRDFLYYATAGAGAVATGAAVWPLINQMN

SEQ ID NO: 12708 - protein, 29 aa, Artificial
  helical interface sequence
RRDFLYYATAGAGAVATGAAVWPLINQMN

SEQ ID NO: 12709 - protein, 14 aa, Artificial
  helical interface sequence
LKTVFDEAIRAVLG

SEQ ID NO: 12710 - protein, 13 aa, Artificial
  helical interface sequence
PFAAQVAAERCAD

SEQ ID NO: 12711 - protein, 16 aa, Artificial
  helical interface sequence
TVSALASIGLGLLGKS

SEQ ID NO: 12712 - protein, 13 aa, Artificial
  helical interface sequence
TAACLRRLFRAIF

SEQ ID NO: 12713 - protein, 17 aa, Artificial
  helical interface sequence
TVFLTVAVGMVLACLVQ

SEQ ID NO: 12714 - protein, 9 aa, Artificial
  helical interface sequence
DNVRPLCYS

SEQ ID NO: 12715 - protein, 10 aa, Artificial
  helical interface sequence
DVYMIMVKCW

SEQ ID NO: 12716 - protein, 21 aa, Artificial
  helical interface sequence
PAVHASLDKFLANVSTVLTSK

SEQ ID NO: 12717 - protein, 9 aa, Artificial
  helical interface sequence
LSDLRVYLG

SEQ ID NO: 12718 - protein, 16 aa, Artificial
  helical interface sequence
QVYNDFLDIMKEFKSQ

SEQ ID NO: 12719 - protein, 15 aa, Artificial
  helical interface sequence
EGDVKSFSRVMVHVF

SEQ ID NO: 12720 - protein, 7 aa, Artificial
  helical interface sequence
EEFGRFA

SEQ ID NO: 12721 - protein, 13 aa, Artificial
  helical interface sequence
ANKRLDAVNRITA

SEQ ID NO: 12722 - protein, 12 aa, Artificial
  helical interface sequence
HWFLNYILSNLN

SEQ ID NO: 12723 - protein, 13 aa, Artificial
  helical interface sequence
ILGRYHCFLDSFN

SEQ ID NO: 12724 - protein, 7 aa, Artificial
  helical interface sequence
PPCILNN

SEQ ID NO: 12725 - protein, 16 aa, Artificial
  helical interface sequence
AIDAAVAIQFALNVTE

SEQ ID NO: 12726 - protein, 12 aa, Artificial
  helical interface sequence
ADTVAGEIAAAL

SEQ ID NO: 12727 - protein, 12 aa, Artificial
  helical interface sequence
RWFLDKLVDEIG

SEQ ID NO: 12728 - protein, 12 aa, Artificial
  helical interface sequence
RWFLDKLVDEIG

SEQ ID NO: 12729 - protein, 11 aa, Artificial
  helical interface sequence
NTLLSEYAYVL

SEQ ID NO: 12730 - protein, 17 aa, Artificial
  helical interface sequence
PLGILSNYVKTLLISMY

SEQ ID NO: 12731 - protein, 6 aa, Artificial
  helical interface sequence
MKELAH

SEQ ID NO: 12732 - protein, 11 aa, Artificial
  helical interface sequence
NACGLFLKLHG

SEQ ID NO: 12733 - protein, 8 aa, Artificial
  helical interface sequence
VVENIIIG

SEQ ID NO: 12734 - protein, 12 aa, Artificial
  helical interface sequence
LQRTYDYLNSVE

SEQ ID NO: 12735 - protein, 12 aa, Artificial
  helical interface sequence
YCRHNYGVVESF

SEQ ID NO: 12736 - protein, 7 aa, Artificial
  helical interface sequence
LDDMEEM

SEQ ID NO: 12737 - protein, 15 aa, Artificial
  helical interface sequence
ALDACCMVHDHCVDT

SEQ ID NO: 12738 - protein, 13 aa, Artificial
  helical interface sequence
VATWIFTIARNRR

SEQ ID NO: 12739 - protein, 5 aa, Artificial
  helical interface sequence
SLASV

SEQ ID NO: 12740 - protein, 17 aa, Artificial
  helical interface sequence
GTIKSRIRLALDRLRQH

SEQ ID NO: 12741 - protein, 20 aa, Artificial
  helical interface sequence
ARSMIEHARTAAVTHNLYYD

SEQ ID NO: 12742 - protein, 10 aa, Artificial
  helical interface sequence
ASIIYDALVS

SEQ ID NO: 12743 - protein, 12 aa, Artificial
  helical interface sequence
FQVEYSLEAIKL

SEQ ID NO: 12744 - protein, 15 aa, Artificial
  helical interface sequence
IPAFADRLGQYVQAH

SEQ ID NO: 12745 - protein, 11 aa, Artificial
  helical interface sequence
SLAAMAVLESH

SEQ ID NO: 12746 - protein, 6 aa, Artificial
  helical interface sequence
RDASTL

SEQ ID NO: 12747 - protein, 10 aa, Artificial
  helical interface sequence
RDASTLKPML

SEQ ID NO: 12748 - protein, 6 aa, Artificial
  helical interface sequence
SEELET

SEQ ID NO: 12749 - protein, 22 aa, Artificial
  helical interface sequence
CLGGITLVCFLIQFATGFAMTF

SEQ ID NO: 12750 - protein, 10 aa, Artificial
  helical interface sequence
PGRVFDMLNR

SEQ ID NO: 12751 - protein, 5 aa, Artificial
  helical interface sequence
AYQRF

SEQ ID NO: 12752 - protein, 14 aa, Artificial
  helical interface sequence
SRARIDARIDFESG

SEQ ID NO: 12753 - protein, 38 aa, Artificial
  helical interface sequence
EEEQFALALKMSEQEAREVNNQEEKEEELLRKAIAESL

SEQ ID NO: 12754 - protein, 8 aa, Artificial
  helical interface sequence
KINLLGFL

SEQ ID NO: 12755 - protein, 15 aa, Artificial
  helical interface sequence
PANFKILSHNLLVVL

SEQ ID NO: 12756 - protein, 9 aa, Artificial
  helical interface sequence
GLFYSIFTD

SEQ ID NO: 12757 - protein, 5 aa, Artificial
  helical interface sequence
DRLRP

SEQ ID NO: 12758 - protein, 16 aa, Artificial
  helical interface sequence
STQLCQAAVHALSSLA

SEQ ID NO: 12759 - protein, 13 aa, Artificial
  helical interface sequence
MVTANRFWSQIFG

SEQ ID NO: 12760 - protein, 20 aa, Artificial
  helical interface sequence
ETLKITVYIVVTFFVLLFVF

SEQ ID NO: 12761 - protein, 24 aa, Artificial
  helical interface sequence
TVLSSSIAAVFFAAFVVAGTMWYG

SEQ ID NO: 12762 - protein, 5 aa, Artificial
  helical interface sequence
GWARR

SEQ ID NO: 12763 - protein, 9 aa, Artificial
  helical interface sequence
KDLTIGQMQ

SEQ ID NO: 12764 - protein, 6 aa, Artificial
  helical interface sequence
YEYCMS

SEQ ID NO: 12765 - protein, 10 aa, Artificial
  helical interface sequence
AYTEELKKRG

SEQ ID NO: 12766 - protein, 18 aa, Artificial
  helical interface sequence
KRAVRRLRTACERAKRTL

SEQ ID NO: 12767 - protein, 23 aa, Artificial
  helical interface sequence
VADARVLVDFARISAQQEKVTYG

SEQ ID NO: 12768 - protein, 8 aa, Artificial
  helical interface sequence
PSIVHRKC

SEQ ID NO: 12769 - protein, 11 aa, Artificial
  helical interface sequence
SVWIGGSILAS

SEQ ID NO: 12770 - protein, 9 aa, Artificial
  helical interface sequence
PVGPALGQH

SEQ ID NO: 12771 - protein, 6 aa, Artificial
  helical interface sequence
YAQTLQ

SEQ ID NO: 12772 - protein, 29 aa, Artificial
  helical interface sequence
GYILRYLHANGASFFFMVMFMHMAKGLYY

SEQ ID NO: 12773 - protein, 17 aa, Artificial
  helical interface sequence
TSQMAKDVTTFLNWCAE

SEQ ID NO: 12774 - protein, 16 aa, Artificial
  helical interface sequence
AGEYGAEALERTFCSF

SEQ ID NO: 12775 - protein, 15 aa, Artificial
  helical interface sequence
PRGETIERVLREEKG

SEQ ID NO: 12776 - protein, 10 aa, Artificial
  helical interface sequence
FEYLQAFLED

SEQ ID NO: 12777 - protein, 9 aa, Artificial
  helical interface sequence
LVDYLRSRG

SEQ ID NO: 12778 - protein, 20 aa, Artificial
  helical interface sequence
HTIAAFLGGAAAQEVIKIIT

SEQ ID NO: 12779 - protein, 12 aa, Artificial
  helical interface sequence
GERRLRIAQTLT

SEQ ID NO: 12780 - protein, 12 aa, Artificial
  helical interface sequence
GERRLRIAQTLT

SEQ ID NO: 12781 - protein, 12 aa, Artificial
  helical interface sequence
GERRLRIAQTLT

SEQ ID NO: 12782 - protein, 12 aa, Artificial
  helical interface sequence
ALELLMAANFLD

SEQ ID NO: 12783 - protein, 18 aa, Artificial
  helical interface sequence
PYITNRTFMLAKEASLAD

SEQ ID NO: 12784 - protein, 19 aa, Artificial
  helical interface sequence
ITLVLSVLFFVSCVVTAFV

SEQ ID NO: 12785 - protein, 19 aa, Artificial
  helical interface sequence
SGRIVGFFDVGRYVCEEVL

SEQ ID NO: 12786 - protein, 8 aa, Artificial
  helical interface sequence
EIERILVR

SEQ ID NO: 12787 - protein, 9 aa, Artificial
  helical interface sequence
KAKARAILT

SEQ ID NO: 12788 - protein, 16 aa, Artificial
  helical interface sequence
TPLQAALAEAFWIDIK

SEQ ID NO: 12789 - protein, 12 aa, Artificial
  helical interface sequence
YTEQLRRAARRN

SEQ ID NO: 12790 - protein, 15 aa, Artificial
  helical interface sequence
HHELVYEAIVMVLES

SEQ ID NO: 12791 - protein, 15 aa, Artificial
  helical interface sequence
ELDMMVGKILCYLYL

SEQ ID NO: 12792 - protein, 6 aa, Artificial
  helical interface sequence
KILEDN

SEQ ID NO: 12793 - protein, 12 aa, Artificial
  helical interface sequence
VKDIIFAIKKTL

SEQ ID NO: 12794 - protein, 12 aa, Artificial
  helical interface sequence
VKDIIFAIKKTL

SEQ ID NO: 12795 - protein, 6 aa, Artificial
  helical interface sequence
KILEDN

SEQ ID NO: 12796 - protein, 13 aa, Artificial
  helical interface sequence
EEDLCAAFNVICD

SEQ ID NO: 12797 - protein, 16 aa, Artificial
  helical interface sequence
AIADLSVNMYNRLRAT

SEQ ID NO: 12798 - protein, 18 aa, Artificial
  helical interface sequence
PYAAQLAALDAAKKAMAY

SEQ ID NO: 12799 - protein, 7 aa, Artificial
  helical interface sequence
HLALEDY

SEQ ID NO: 12800 - protein, 16 aa, Artificial
  helical interface sequence
GHAKRLAPEYEAAATR

SEQ ID NO: 12801 - protein, 15 aa, Artificial
  helical interface sequence
LEKIEPAQEEHEKYH

SEQ ID NO: 12802 - protein, 10 aa, Artificial
  helical interface sequence
RRAFSDLTSQ

SEQ ID NO: 12803 - protein, 9 aa, Artificial
  helical interface sequence
EHLIVELYS

SEQ ID NO: 12804 - protein, 10 aa, Artificial
  helical interface sequence
VFYLHSRLLE

SEQ ID NO: 12805 - protein, 5 aa, Artificial
  helical interface sequence
LLERA

SEQ ID NO: 12806 - protein, 11 aa, Artificial
  helical interface sequence
YEELKHLLSRI

SEQ ID NO: 12807 - protein, 11 aa, Artificial
  helical interface sequence
NCLDAAKACNL

SEQ ID NO: 12808 - protein, 11 aa, Artificial
  helical interface sequence
DEELRAMIEEF

SEQ ID NO: 12809 - protein, 5 aa, Artificial
  helical interface sequence
VQAWI

SEQ ID NO: 12810 - protein, 15 aa, Artificial
  helical interface sequence
EEQIAEFKEAFSLFD

SEQ ID NO: 12811 - protein, 15 aa, Artificial
  helical interface sequence
PEVKRRIMLGTFALS

SEQ ID NO: 12812 - protein, 7 aa, Artificial
  helical interface sequence
REKALMN

SEQ ID NO: 12813 - protein, 29 aa, Artificial
  helical interface sequence
TKRALIQCAKDIAKASDEVTRLAKEVAKQ

SEQ ID NO: 12814 - protein, 6 aa, Artificial
  helical interface sequence
SSDFEA

SEQ ID NO: 12815 - protein, 7 aa, Artificial
  helical interface sequence
SSDFEAR

SEQ ID NO: 12816 - protein, 28 aa, Artificial
  helical interface sequence
LSRLFDNAMLRAHRLHQLAFDTYQEFEE

SEQ ID NO: 12817 - protein, 11 aa, Artificial
  helical interface sequence
PTELFFHAAGG

SEQ ID NO: 12818 - protein, 9 aa, Artificial
  helical interface sequence
IRHILLIAD

SEQ ID NO: 12819 - protein, 12 aa, Artificial
  helical interface sequence
HTLGNLIRAELL

SEQ ID NO: 12820 - protein, 14 aa, Artificial
  helical interface sequence
WQMLEMLKPCVEDG

SEQ ID NO: 12821 - protein, 16 aa, Artificial
  helical interface sequence
AQEFLKLLMERLHLEI

SEQ ID NO: 12822 - protein, 6 aa, Artificial
  helical interface sequence
KMTRIL

SEQ ID NO: 12823 - protein, 11 aa, Artificial
  helical interface sequence
KENIIAAAQAG

SEQ ID NO: 12824 - protein, 7 aa, Artificial
  helical interface sequence
PWTQRFF

SEQ ID NO: 12825 - protein, 9 aa, Artificial
  helical interface sequence
SILDERVLN

SEQ ID NO: 12826 - protein, 15 aa, Artificial
  helical interface sequence
ALDAVESGCAMCERE

SEQ ID NO: 12827 - protein, 14 aa, Artificial
  helical interface sequence
GEKRLRIAQILTDN

SEQ ID NO: 12828 - protein, 14 aa, Artificial
  helical interface sequence
GELRVRAATTIAAN

SEQ ID NO: 12829 - protein, 7 aa, Artificial
  helical interface sequence
TPIEEIG

SEQ ID NO: 12830 - protein, 13 aa, Artificial
  helical interface sequence
PGELDRIKSFVSS

SEQ ID NO: 12831 - protein, 12 aa, Artificial
  helical interface sequence
WFREQQRIQKMG

SEQ ID NO: 12832 - protein, 7 aa, Artificial
  helical interface sequence
HMGKVAN

SEQ ID NO: 12833 - protein, 18 aa, Artificial
  helical interface sequence
SQAGVEFTSALDYVINSL

SEQ ID NO: 12834 - protein, 18 aa, Artificial
  helical interface sequence
SQAGVEFTSALDYVINSL

SEQ ID NO: 12835 - protein, 21 aa, Artificial
  helical interface sequence
DEGCLRKYRRQCMQDMHQKLS

SEQ ID NO: 12836 - protein, 10 aa, Artificial
  helical interface sequence
LTARLYSLLF

SEQ ID NO: 12837 - protein, 6 aa, Artificial
  helical interface sequence
GFNKLG

SEQ ID NO: 12838 - protein, 10 aa, Artificial
  helical interface sequence
PSVVFDDIVT

SEQ ID NO: 12839 - protein, 9 aa, Artificial
  helical interface sequence
FEDYVEGLR

SEQ ID NO: 12840 - protein, 16 aa, Artificial
  helical interface sequence
ILNEGPEILRDAARWC

SEQ ID NO: 12841 - protein, 16 aa, Artificial
  helical interface sequence
ILNEGPEILRDAARWC

SEQ ID NO: 12842 - protein, 19 aa, Artificial
  helical interface sequence
DKEYQIMRNASMAVLREIG

SEQ ID NO: 12843 - protein, 5 aa, Artificial
  helical interface sequence
EQLKS

SEQ ID NO: 12844 - protein, 11 aa, Artificial
  helical interface sequence
FQFGVSLGNAF

SEQ ID NO: 12845 - protein, 24 aa, Artificial
  helical interface sequence
MHIGTMVEFAYALVGKLDAINKHS

SEQ ID NO: 12846 - protein, 9 aa, Artificial
  helical interface sequence
PIKVLHEAE

SEQ ID NO: 12847 - protein, 5 aa, Artificial
  helical interface sequence
QMEMF

SEQ ID NO: 12848 - protein, 6 aa, Artificial
  helical interface sequence
PLQQAQ

SEQ ID NO: 12849 - protein, 7 aa, Artificial
  helical interface sequence
YFAEVEQ

SEQ ID NO: 12850 - protein, 11 aa, Artificial
  helical interface sequence
PDMVWDFWSLR

SEQ ID NO: 12851 - protein, 8 aa, Artificial
  helical interface sequence
YDEIEQTL

SEQ ID NO: 12852 - protein, 23 aa, Artificial
  helical interface sequence
PDRVDMLQEPLLEALKVYVRKRR

SEQ ID NO: 12853 - protein, 14 aa, Artificial
  helical interface sequence
LKNVFDEAILAALE

SEQ ID NO: 12854 - protein, 6 aa, Artificial
  helical interface sequence
QTAALL

SEQ ID NO: 12855 - protein, 12 aa, Artificial
  helical interface sequence
RAEGTAVGFSFF

SEQ ID NO: 12856 - protein, 12 aa, Artificial
  helical interface sequence
RAEGTAVGFSFF

SEQ ID NO: 12857 - protein, 20 aa, Artificial
  helical interface sequence
AEVVEWVHRIFDQRTKFGFQ

SEQ ID NO: 12858 - protein, 7 aa, Artificial
  helical interface sequence
RMPAKLD

SEQ ID NO: 12859 - protein, 17 aa, Artificial
  helical interface sequence
TGHTMLFAVANECLKLG

SEQ ID NO: 12860 - protein, 17 aa, Artificial
  helical interface sequence
TGHTMLFAVANECLKLG

SEQ ID NO: 12861 - protein, 13 aa, Artificial
  helical interface sequence
IFIVLNMIRETYD

SEQ ID NO: 12862 - protein, 7 aa, Artificial
  helical interface sequence
RMPAKLD

SEQ ID NO: 12863 - protein, 17 aa, Artificial
  helical interface sequence
TGHTMLFAVANECLKLG

SEQ ID NO: 12864 - protein, 16 aa, Artificial
  helical interface sequence
VNKFQMAYSNLLRANM

SEQ ID NO: 12865 - protein, 5 aa, Artificial
  helical interface sequence
SKFTE

SEQ ID NO: 12866 - protein, 16 aa, Artificial
  helical interface sequence
AVEQLVCEIAAERWRS

SEQ ID NO: 12867 - protein, 12 aa, Artificial
  helical interface sequence
SREIQTAVRLLL

SEQ ID NO: 12868 - protein, 6 aa, Artificial
  helical interface sequence
FQFLKH

SEQ ID NO: 12869 - protein, 17 aa, Artificial
  helical interface sequence
YQSTAAVALHIAGKVRA

SEQ ID NO: 12870 - protein, 13 aa, Artificial
  helical interface sequence
GNKRLDVVNKITN

SEQ ID NO: 12871 - protein, 12 aa, Artificial
  helical interface sequence
AFAKVVAQADAR

SEQ ID NO: 12872 - protein, 18 aa, Artificial
  helical interface sequence
GYSANSQGKVAAAAVVVL

SEQ ID NO: 12873 - protein, 10 aa, Artificial
  helical interface sequence
LNVQRKAIHE

SEQ ID NO: 12874 - protein, 14 aa, Artificial
  helical interface sequence
PYVKEAENLKKYFN

SEQ ID NO: 12875 - protein, 22 aa, Artificial
  helical interface sequence
ATDVTTLNEMFRYKTNLYKLKE

SEQ ID NO: 12876 - protein, 13 aa, Artificial
  helical interface sequence
FQVEYALEAIKQG

SEQ ID NO: 12877 - protein, 12 aa, Artificial
  helical interface sequence
KYPLLLRELFAL

SEQ ID NO: 12878 - protein, 14 aa, Artificial
  helical interface sequence
RMHESMKLFDSICN

SEQ ID NO: 12879 - protein, 8 aa, Artificial
  helical interface sequence
KRWYRLAS

SEQ ID NO: 12880 - protein, 14 aa, Artificial
  helical interface sequence
QGTLFELILAANYL

SEQ ID NO: 12881 - protein, 8 aa, Artificial
  helical interface sequence
KRWYRLAS

SEQ ID NO: 12882 - protein, 19 aa, Artificial
  helical interface sequence
PVNFKLLSHSLLVTLASHL

SEQ ID NO: 12883 - protein, 8 aa, Artificial
  helical interface sequence
RQAYADMF

SEQ ID NO: 12884 - protein, 22 aa, Artificial
  helical interface sequence
AADTQAIADIVQYHLELYTSQY

SEQ ID NO: 12885 - protein, 15 aa, Artificial
  helical interface sequence
PETFTQLVSSSLYER

SEQ ID NO: 12886 - protein, 16 aa, Artificial
  helical interface sequence
FDGFAIFARDMDMTLN

SEQ ID NO: 12887 - protein, 8 aa, Artificial
  helical interface sequence
KEYQELNF

SEQ ID NO: 12888 - protein, 6 aa, Artificial
  helical interface sequence
LTTYLD

SEQ ID NO: 12889 - protein, 10 aa, Artificial
  helical interface sequence
TGPMDEYLIA

SEQ ID NO: 12890 - protein, 10 aa, Artificial
  helical interface sequence
PIGMNGALAK

SEQ ID NO: 12891 - protein, 8 aa, Artificial
  helical interface sequence
AEYEALNF

SEQ ID NO: 12892 - protein, 11 aa, Artificial
  helical interface sequence
WNWINKQQGKR

SEQ ID NO: 12893 - protein, 12 aa, Artificial
  helical interface sequence
NYGQYLYKQTKD

SEQ ID NO: 12894 - protein, 11 aa, Artificial
  helical interface sequence
GRAMAETLELL

SEQ ID NO: 12895 - protein, 19 aa, Artificial
  helical interface sequence
PVNFKFLGHCFLVVVAIHH

SEQ ID NO: 12896 - protein, 22 aa, Artificial
  helical interface sequence
KDLLEQRRAAVDTYCRHNYGVG

SEQ ID NO: 12897 - protein, 13 aa, Artificial
  helical interface sequence
WFIQSLCAMLKQY

SEQ ID NO: 12898 - protein, 13 aa, Artificial
  helical interface sequence
AFAKVVAQADARG

SEQ ID NO: 12899 - protein, 11 aa, Artificial
  helical interface sequence
LEEAQRIWKQK

SEQ ID NO: 12900 - protein, 6 aa, Artificial
  helical interface sequence
AIFNML

SEQ ID NO: 12901 - protein, 12 aa, Artificial
  helical interface sequence
KKEIKLARRLRG

SEQ ID NO: 12902 - protein, 15 aa, Artificial
  helical interface sequence
VEYITRYIASLKQRY

SEQ ID NO: 12903 - protein, 7 aa, Artificial
  helical interface sequence
ARVRHIP

SEQ ID NO: 12904 - protein, 17 aa, Artificial
  helical interface sequence
TVNAAFVRESAEVYQQR

SEQ ID NO: 12905 - protein, 22 aa, Artificial
  helical interface sequence
SVWVSNHYRWIVWKLAAMEFAF

SEQ ID NO: 12906 - protein, 7 aa, Artificial
  helical interface sequence
AMMQALL

SEQ ID NO: 12907 - protein, 15 aa, Artificial
  helical interface sequence
TETAASVFKELCYEN

SEQ ID NO: 12908 - protein, 15 aa, Artificial
  helical interface sequence
VAAASKILSNLVYQY

SEQ ID NO: 12909 - protein, 15 aa, Artificial
  helical interface sequence
VVSALQMLKQHLFKY

SEQ ID NO: 12910 - protein, 19 aa, Artificial
  helical interface sequence
AEAHAAWDKFLSVVSSVLT

SEQ ID NO: 12911 - protein, 16 aa, Artificial
  helical interface sequence
ADTIGTETLERLFLSH

SEQ ID NO: 12912 - protein, 10 aa, Artificial
  helical interface sequence
TNETTKSIER

SEQ ID NO: 12913 - protein, 24 aa, Artificial
  helical interface sequence
PAEREAELDDLKTELLNARAVQAA

SEQ ID NO: 12914 - protein, 6 aa, Artificial
  helical interface sequence
SEELET

SEQ ID NO: 12915 - protein, 19 aa, Artificial
  helical interface sequence
PAVHASLDKFLASVSTVLT

SEQ ID NO: 12916 - protein, 8 aa, Artificial
  helical interface sequence
FINLIKSK

SEQ ID NO: 12917 - protein, 5 aa, Artificial
  helical interface sequence
YLDLL

SEQ ID NO: 12918 - protein, 13 aa, Artificial
  helical interface sequence
YPRALWWSVETAT

SEQ ID NO: 12919 - protein, 6 aa, Artificial
  helical interface sequence
YCSEVC

SEQ ID NO: 12920 - protein, 14 aa, Artificial
  helical interface sequence
MPYAVTDAVLAPHI

SEQ ID NO: 12921 - protein, 29 aa, Artificial
  helical interface sequence
PEYWERETQKAKGNEQSFRVDLRTLLGYY

SEQ ID NO: 12922 - protein, 16 aa, Artificial
  helical interface sequence
SARADDARQLFVLAGA

SEQ ID NO: 12923 - protein, 12 aa, Artificial
  helical interface sequence
SREIQTAVRLLL

SEQ ID NO: 12924 - protein, 14 aa, Artificial
  helical interface sequence
HPNRVLEHLHSTAF

SEQ ID NO: 12925 - protein, 32 aa, Artificial; identical to SEQ ID NO: 3730
  helical interface sequence

SEQ ID NO: 12926 - protein, 33 aa, Artificial
  helical interface sequence
NPTIQRFFALHYLVPFIIAAMVIMHLMALHIHG

SEQ ID NO: 12927 - protein, 13 aa, Artificial
  helical interface sequence
LDSYLLKPVQRIT

SEQ ID NO: 12928 - protein, 25 aa, Artificial
  helical interface sequence
AEDLQEALSSILGILKAVNDSMHLI

SEQ ID NO: 12929 - protein, 13 aa, Artificial
  helical interface sequence
LDSYLLKPVQRIT

SEQ ID NO: 12930 - protein, 27 aa, Artificial
  helical interface sequence
TSDLQSVQGNIQRAAARLEAAEKLGSN

SEQ ID NO: 12931 - protein, 33 aa, Artificial
  helical interface sequence
PLHAFDDLESVIRNLISDYDKLFLMFKGLIQRS

SEQ ID NO: 12932 - protein, 6 aa, Artificial
  helical interface sequence
SEQLTS

SEQ ID NO: 12933 - protein, 12 aa, Artificial
  helical interface sequence
PSLLNMYKELEN

SEQ ID NO: 12934 - protein, 6 aa, Artificial
  helical interface sequence
KDNLDN

SEQ ID NO: 12935 - protein, 8 aa, Artificial
  helical interface sequence
ASVDRYYH

SEQ ID NO: 12936 - protein, 13 aa, Artificial
  helical interface sequence
MVKTAAAFGAIFT

SEQ ID NO: 12937 - protein, 13 aa, Artificial
  helical interface sequence
MVKTAAAFGAIFT

SEQ ID NO: 12938 - protein, 5 aa, Artificial
  helical interface sequence
WRAYI

SEQ ID NO: 12939 - protein, 9 aa, Artificial
  helical interface sequence
ALQEGFRMM

SEQ ID NO: 12940 - protein, 10 aa, Artificial
  helical interface sequence
YEIILAANYL

SEQ ID NO: 12941 - protein, 14 aa, Artificial
  helical interface sequence
MRDVVFNYLHATAF

SEQ ID NO: 12942 - protein, 33 aa, Artificial; identical to SEQ ID NO: 3637
  helical interface sequence

SEQ ID NO: 12943 - protein, 25 aa, Artificial
  helical interface sequence
VAGVRDHFRIAALWWHQMIHKIIRV

SEQ ID NO: 12944 - protein, 5 aa, Artificial
  helical interface sequence
VVFAE

SEQ ID NO: 12945 - protein, 12 aa, Artificial
  helical interface sequence
IFDIEEELKAQL

SEQ ID NO: 12946 - protein, 14 aa, Artificial
  helical interface sequence
MVKTAAAFGAIFTG

SEQ ID NO: 12947 - protein, 5 aa, Artificial
  helical interface sequence
FAEMN

SEQ ID NO: 12948 - protein, 5 aa, Artificial
  helical interface sequence
FAEMN

SEQ ID NO: 12949 - protein, 25 aa, Artificial
  helical interface sequence
AEENFLILTEMATSHVQILVEFTKR

SEQ ID NO: 12950 - protein, 10 aa, Artificial
  helical interface sequence
RELDELMASL

SEQ ID NO: 12951 - protein, 7 aa, Artificial
  helical interface sequence
MLGEVLN

SEQ ID NO: 12952 - protein, 5 aa, Artificial
  helical interface sequence
PRLSH

SEQ ID NO: 12953 - protein, 9 aa, Artificial
  helical interface sequence
YVVRLAKYT

SEQ ID NO: 12954 - protein, 6 aa, Artificial
  helical interface sequence
DEEART

SEQ ID NO: 12955 - protein, 7 aa, Artificial
  helical interface sequence
FTDYLRG

SEQ ID NO: 12956 - protein, 23 aa, Artificial
  helical interface sequence
AGIAIELVRLFAVELEHYEKIEG

SEQ ID NO: 12957 - protein, 23 aa, Artificial
  helical interface sequence
AGIAIELVRLFAVELEHYEKIEG

SEQ ID NO: 12958 - protein, 23 aa, Artificial
  helical interface sequence
AGIAIELVRLFAVELEHYEKIEG

SEQ ID NO: 12959 - protein, 30 aa, Artificial
  helical interface sequence
LFAWSVFITAWLILLSLPVLAGAITMLLMD

SEQ ID NO: 12960 - protein, 33 aa, Artificial; identical to SEQ ID NO: 5399
  helical interface sequence

SEQ ID NO: 12961 - protein, 20 aa, Artificial
  helical interface sequence
PENFRLLGNVIVVVLARRLG

SEQ ID NO: 12962 - protein, 6 aa, Artificial
  helical interface sequence
SADWYN

SEQ ID NO: 12963 - protein, 5 aa, Artificial
  helical interface sequence
EEFAK

SEQ ID NO: 12964 - protein, 22 aa, Artificial
  helical interface sequence
QKSTQNAINGITNKVNSVIEKM

SEQ ID NO: 12965 - protein, 18 aa, Artificial
  helical interface sequence
PSYIFEYLATVMYQRRSK

SEQ ID NO: 12966 - protein, 15 aa, Artificial
  helical interface sequence
VVSALQMLKQHLFKY

SEQ ID NO: 12967 - protein, 19 aa, Artificial
  helical interface sequence
VEDALYLGKRSILAAAHRD

SEQ ID NO: 12968 - protein, 15 aa, Artificial
  helical interface sequence
VVSALQMLKQHLFKY

SEQ ID NO: 12969 - protein, 8 aa, Artificial
  helical interface sequence
QLKRWIGS

SEQ ID NO: 12970 - protein, 22 aa, Artificial
  helical interface sequence
AQGALANIAVDKANLEIMTKRS

SEQ ID NO: 12971 - protein, 11 aa, Artificial
  helical interface sequence
PKVLQRLIKSR

SEQ ID NO: 12972 - protein, 9 aa, Artificial
  helical interface sequence
RAIAEDAAQ

SEQ ID NO: 12973 - protein, 9 aa, Artificial
  helical interface sequence
RAIAEDAAQ

SEQ ID NO: 12974 - protein, 16 aa, Artificial
  helical interface sequence
PEELTPLILATQKQFN

SEQ ID NO: 12975 - protein, 9 aa, Artificial
  helical interface sequence
YSSLIKYYA

SEQ ID NO: 12976 - protein, 11 aa, Artificial
  helical interface sequence
LADQMSLLQSA

SEQ ID NO: 12977 - protein, 11 aa, Artificial
  helical interface sequence
LADQMSLLQSA

SEQ ID NO: 12978 - protein, 20 aa, Artificial
  helical interface sequence
PDNVMTAEMRKIAMAAVLSG

SEQ ID NO: 12979 - protein, 5 aa, Artificial
  helical interface sequence
FEKKQ

SEQ ID NO: 12980 - protein, 5 aa, Artificial
  helical interface sequence
FEKKQ

SEQ ID NO: 12981 - protein, 15 aa, Artificial
  helical interface sequence
SGLDSVGNAVRAIEE

SEQ ID NO: 12982 - protein, 18 aa, Artificial
  helical interface sequence
EESFARAKNWVKELQRQA

SEQ ID NO: 12983 - protein, 14 aa, Artificial
  helical interface sequence
FITFLGALKSFLKG

SEQ ID NO: 12984 - protein, 13 aa, Artificial
  helical interface sequence
TVALREIRRYQKS

SEQ ID NO: 12985 - protein, 18 aa, Artificial
  helical interface sequence
ARPSFERILLYCQSVARY

SEQ ID NO: 12986 - protein, 5 aa, Artificial
  helical interface sequence
EVMQT

SEQ ID NO: 12987 - protein, 14 aa, Artificial
  helical interface sequence
DEQIAAQVDYIVAN

SEQ ID NO: 12988 - protein, 15 aa, Artificial
  helical interface sequence
LLPPSFLLLLASSMV

SEQ ID NO: 12989 - protein, 12 aa, Artificial
  helical interface sequence
AWELRKGMNTLV

SEQ ID NO: 12990 - protein, 6 aa, Artificial
  helical interface sequence
LQSLLG

SEQ ID NO: 12991 - protein, 25 aa, Artificial
  helical interface sequence
ILGAVFYIVFIALFFGIAVGIIFAI

SEQ ID NO: 12992 - protein, 15 aa, Artificial
  helical interface sequence
FHVIEEQMAAAVELF

SEQ ID NO: 12993 - protein, 10 aa, Artificial
  helical interface sequence
IHGATVENTL

SEQ ID NO: 12994 - protein, 17 aa, Artificial
  helical interface sequence
YVVQEAIVVIKDIFRKY

SEQ ID NO: 12995 - protein, 13 aa, Artificial
  helical interface sequence
PLIRALAVRTMGC

SEQ ID NO: 12996 - protein, 13 aa, Artificial
  helical interface sequence
LVDLYAMYNKSMR

SEQ ID NO: 12997 - protein, 20 aa, Artificial
  helical interface sequence
WRDRFVFCAEAIYKSQAETG

SEQ ID NO: 12998 - protein, 13 aa, Artificial
  helical interface sequence
LEEVNNNVRLLSE

SEQ ID NO: 12999 - protein, 20 aa, Artificial
  helical interface sequence
ELFDQCENKRRTLFKLASET

SEQ ID NO: 13000 - protein, 10 aa, Artificial
  helical interface sequence
GSNPATASMA

SEQ ID NO: 13001 - protein, 11 aa, Artificial
  helical interface sequence
PEVFVSMLLEA

SEQ ID NO: 13002 - protein, 24 aa, Artificial
  helical interface sequence
EALAEILQANDNLTQVINLYKQLV

SEQ ID NO: 13003 - protein, 5 aa, Artificial
  helical interface sequence
PITKA

SEQ ID NO: 13004 - protein, 15 aa, Artificial
  helical interface sequence
PGFTALIKTLRKCKI

SEQ ID NO: 13005 - protein, 14 aa, Artificial
  helical interface sequence
PGFTALIKTLRKCK

SEQ ID NO: 13006 - protein, 25 aa, Artificial
  helical interface sequence
LYAKLMGLLADLRSINNAYSYELQR

SEQ ID NO: 13007 - protein, 20 aa, Artificial
  helical interface sequence
PDNFKLLSDCLTIVVAAQLG

SEQ ID NO: 13008 - protein, 21 aa, Artificial
  helical interface sequence
PEVHISYDKFFSALARALAEK

SEQ ID NO: 13009 - protein, 17 aa, Artificial
  helical interface sequence
QKLKVKSAFLLQNLLVG

SEQ ID NO: 13010 - protein, 23 aa, Artificial
  helical interface sequence
TAPVSAVQAAVSNLVRVGKETVQ

SEQ ID NO: 13011 - protein, 17 aa, Artificial
  helical interface sequence
PLLLQESQDAVRQVAAA

SEQ ID NO: 13012 - protein, 20 aa, Artificial
  helical interface sequence
APARLHWLATLLMDALKRHH

SEQ ID NO: 13013 - protein, 21 aa, Artificial
  helical interface sequence
WEALLVEMLGLLHRIAMVQLS

SEQ ID NO: 13014 - protein, 23 aa, Artificial
  helical interface sequence
VADARVLVDFARISAQQEKVTYG

SEQ ID NO: 13015 - protein, 15 aa, Artificial
  helical interface sequence
IENLVKRVADQMQQY

SEQ ID NO: 13016 - protein, 8 aa, Artificial
  helical interface sequence
KQTAAKLL

SEQ ID NO: 13017 - protein, 18 aa, Artificial
  helical interface sequence
PLLQGRLFSYTDTQISRL

SEQ ID NO: 13018 - protein, 20 aa, Artificial
  helical interface sequence
PAFRAHATRVLGGLDMCIAL

SEQ ID NO: 13019 - protein, 16 aa, Artificial
  helical interface sequence
MLERAKVKDEWAKAYG

SEQ ID NO: 13020 - protein, 10 aa, Artificial
  helical interface sequence
LQKKLVEVED

SEQ ID NO: 13021 - protein, 22 aa, Artificial
  helical interface sequence
EKTARLLDALKYYGFTLSTTSG

SEQ ID NO: 13022 - protein, 16 aa, Artificial
  helical interface sequence
EQIKRKKYEIVTLRNR

SEQ ID NO: 13023 - protein, 16 aa, Artificial
  helical interface sequence
LSLALYVFDEYLQKTV

SEQ ID NO: 13024 - protein, 16 aa, Artificial
  helical interface sequence
LSLALYVFDEYLQKTV

SEQ ID NO: 13025 - protein, 15 aa, Artificial
  helical interface sequence
VEYLTRYVAGVQQRY

SEQ ID NO: 13026 - protein, 18 aa, Artificial
  helical interface sequence
VEEVIKLVRDSFTSATER

SEQ ID NO: 13027 - protein, 13 aa, Artificial
  helical interface sequence
TVALREIRRYQKS

SEQ ID NO: 13028 - protein, 12 aa, Artificial
  helical interface sequence
SREIQTAVRLLL

SEQ ID NO: 13029 - protein, 12 aa, Artificial
  helical interface sequence
SREIQTAVRLLL

SEQ ID NO: 13030 - protein, 10 aa, Artificial
  helical interface sequence
AAIRDNYFRS

SEQ ID NO: 13031 - protein, 20 aa, Artificial
  helical interface sequence
ALANIAVDKANLEIMTKRSN

SEQ ID NO: 13032 - protein, 11 aa, Artificial
  helical interface sequence
REIQTAVRLLL

SEQ ID NO: 13033 - protein, 14 aa, Artificial
  helical interface sequence
KDSVVAAFQWATKE

SEQ ID NO: 13034 - protein, 9 aa, Artificial
  helical interface sequence
RNNNDRMKV

SEQ ID NO: 13035 - protein, 12 aa, Artificial
  helical interface sequence
AAELRHVMTNLG

SEQ ID NO: 13036 - protein, 7 aa, Artificial
  helical interface sequence
CEDIARV

SEQ ID NO: 13037 - protein, 23 aa, Artificial
  helical interface sequence
FRLVRLLRFLRILLIISRGSKFL

SEQ ID NO: 13038 - protein, 16 aa, Artificial
  helical interface sequence
KTEALELKAKVDLVLG

SEQ ID NO: 13039 - protein, 20 aa, Artificial
  helical interface sequence
LKGRLTSLESQFINALDILE

SEQ ID NO: 13040 - protein, 19 aa, Artificial
  helical interface sequence
PSNFKILNHCILVVISTMF

SEQ ID NO: 13041 - protein, 11 aa, Artificial
  helical interface sequence
VHDVETQFNQY

SEQ ID NO: 13042 - protein, 6 aa, Artificial
  helical interface sequence
PSFWWN

SEQ ID NO: 13043 - protein, 6 aa, Artificial
  helical interface sequence
CMAEVI

SEQ ID NO: 13044 - protein, 11 aa, Artificial
  helical interface sequence
PVSIRKTARRH

SEQ ID NO: 13045 - protein, 10 aa, Artificial
  helical interface sequence
DELLLGIFSC

SEQ ID NO: 13046 - protein, 10 aa, Artificial
  helical interface sequence
PDVTGRLLSQ

SEQ ID NO: 13047 - protein, 28 aa, Artificial
  helical interface sequence
PRSWLATSHFVLAFFFLVGHLWHAGRAR

SEQ ID NO: 13048 - protein, 14 aa, Artificial
  helical interface sequence
TFPFFVVGVVHLIS

SEQ ID NO: 13049 - protein, 25 aa, Artificial
  helical interface sequence
DPLVDVLPVIPVLFLALAFVWQAAV

SEQ ID NO: 13050 - protein, 24 aa, Artificial
  helical interface sequence
VRWVAVHTLAVPTIFFLGAIAAMQ

SEQ ID NO: 13051 - protein, 24 aa, Artificial
  helical interface sequence
VRWVAVHTLAVPTIFFLGAIAAMQ

SEQ ID NO: 13052 - protein, 11 aa, Artificial
  helical interface sequence
DEFIAHRLGLI

SEQ ID NO: 13053 - protein, 13 aa, Artificial
  helical interface sequence
FPEFLTMMARKMK

SEQ ID NO: 13054 - protein, 28 aa, Artificial
  helical interface sequence
PDEFRQAFDLAVKGINIIYNLEREALKS

SEQ ID NO: 13055 - protein, 16 aa, Artificial
  helical interface sequence
TGHTMLFAVANECLKL

SEQ ID NO: 13056 - protein, 7 aa, Artificial
  helical interface sequence
EDFFPLS

SEQ ID NO: 13057 - protein, 6 aa, Artificial
  helical interface sequence
PRCAWR

SEQ ID NO: 13058 - protein, 12 aa, Artificial
  helical interface sequence
NTELQAVFGRFN

SEQ ID NO: 13059 - protein, 12 aa, Artificial
  helical interface sequence
LVDDFEKKFNAL

SEQ ID NO: 13060 - protein, 16 aa, Artificial
  helical interface sequence
SQAHRNTGNNAARLVK

SEQ ID NO: 13061 - protein, 16 aa, Artificial
  helical interface sequence
AAFTAHCLRVTGALNR

SEQ ID NO: 13062 - protein, 16 aa, Artificial
  helical interface sequence
DFEILEMAVRELAIEK

SEQ ID NO: 13063 - protein, 16 aa, Artificial
  helical interface sequence
DFEILEMAVRELAIEK

SEQ ID NO: 13064 - protein, 16 aa, Artificial
  helical interface sequence
DFEILEMAVRELAIEK

SEQ ID NO: 13065 - protein, 16 aa, Artificial
  helical interface sequence
DFEILEMAVRELAIEK

SEQ ID NO: 13066 - protein, 8 aa, Artificial
  helical interface sequence
ENEFIAIC

SEQ ID NO: 13067 - protein, 16 aa, Artificial
  helical interface sequence
DFEILEMAVRELAIEK

SEQ ID NO: 13068 - protein, 8 aa, Artificial
  helical interface sequence
HTLFRAYT

SEQ ID NO: 13069 - protein, 16 aa, Artificial
  helical interface sequence
DFEILEMAVRELAIEK

SEQ ID NO: 13070 - protein, 16 aa, Artificial
  helical interface sequence
DFEILEMAVRELAIEK

SEQ ID NO: 13071 - protein, 8 aa, Artificial
  helical interface sequence
HTLFRAYT

SEQ ID NO: 13072 - protein, 24 aa, Artificial
  helical interface sequence
IDVLGWVALLVVFTWSIAMVVWGR

SEQ ID NO: 13073 - protein, 24 aa, Artificial
  helical interface sequence
AAEYYRAYLEGECVEWLHRYLKNG

SEQ ID NO: 13074 - protein, 21 aa, Artificial
  helical interface sequence
AAEYYRAYLEGECVEWLHRYL

SEQ ID NO: 13075 - protein, 29 aa, Artificial
  helical interface sequence
ADEIRTLVKDMWDTRIAKLRVSADSFVRQ

SEQ ID NO: 13076 - protein, 8 aa, Artificial
  helical interface sequence
EAEISHTQ

SEQ ID NO: 13077 - protein, 14 aa, Artificial
  helical interface sequence
AGEMVNEAALALEY

SEQ ID NO: 13078 - protein, 6 aa, Artificial
  helical interface sequence
GGALGI

SEQ ID NO: 13079 - protein, 24 aa, Artificial
  helical interface sequence
LSQVEQSGVVVLILTLLSSAGIAA

SEQ ID NO: 13080 - protein, 41 aa, Artificial
  helical interface sequence
GERVSRSREKHALLEGRTKELGYTVKKHLQDLSGRISRARH

SEQ ID NO: 13081 - protein, 8 aa, Artificial
  helical interface sequence
TQHVREQS

SEQ ID NO: 13082 - protein, 23 aa, Artificial
  helical interface sequence
AAVAVEFARLYAVELEHYEKLEG

SEQ ID NO: 13083 - protein, 11 aa, Artificial
  helical interface sequence
AMDVVYALKRQ

SEQ ID NO: 13084 - protein, 5 aa, Artificial
  helical interface sequence
NLAAN

SEQ ID NO: 13085 - protein, 8 aa, Artificial
  helical interface sequence
FPEFLTMM

SEQ ID NO: 13086 - protein, 5 aa, Artificial
  helical interface sequence
PEAKK

SEQ ID NO: 13087 - protein, 5 aa, Artificial
  helical interface sequence
PEAKK

SEQ ID NO: 13088 - protein, 5 aa, Artificial
  helical interface sequence
PEAKK

SEQ ID NO: 13089 - protein, 5 aa, Artificial
  helical interface sequence
PEAKK

SEQ ID NO: 13090 - protein, 5 aa, Artificial
  helical interface sequence
CEEAC

SEQ ID NO: 13091 - protein, 17 aa, Artificial
  helical interface sequence
RRAADRLEQAIKEARAR

SEQ ID NO: 13092 - protein, 6 aa, Artificial
  helical interface sequence
PELASG

SEQ ID NO: 13093 - protein, 15 aa, Artificial
  helical interface sequence
VDLAFASVEHIMRNV

SEQ ID NO: 13094 - protein, 11 aa, Artificial
  helical interface sequence
IGHSIQTWLLG

SEQ ID NO: 13095 - protein, 7 aa, Artificial
  helical interface sequence
GEEIIRA

SEQ ID NO: 13096 - protein, 11 aa, Artificial
  helical interface sequence
FKNLKRVAKEL

SEQ ID NO: 13097 - protein, 18 aa, Artificial
  helical interface sequence
MDDAYDRLTRHRCRMVER

SEQ ID NO: 13098 - protein, 16 aa, Artificial
  helical interface sequence
QRLVQNCLWTLRNLSD

SEQ ID NO: 13099 - protein, 10 aa, Artificial
  helical interface sequence
VNALIRSVLL

SEQ ID NO: 13100 - protein, 15 aa, Artificial
  helical interface sequence
MDKINNRFNYLFEVN

SEQ ID NO: 13101 - protein, 16 aa, Artificial
  helical interface sequence
EEELVKLVTHFEEMTE

SEQ ID NO: 13102 - protein, 15 aa, Artificial
  helical interface sequence
PWLNMDRMLRSAMRL

SEQ ID NO: 13103 - protein, 12 aa, Artificial
  helical interface sequence
SREIQTAVRLLL

SEQ ID NO: 13104 - protein, 29 aa, Artificial
  helical interface sequence
SKAMGIMNSFVNDIFERIAGEASRLAHYN

SEQ ID NO: 13105 - protein, 16 aa, Artificial
  helical interface sequence
IYAWEALEVVLIGAAF

SEQ ID NO: 13106 - protein, 5 aa, Artificial
  helical interface sequence
GVYQL

SEQ ID NO: 13107 - protein, 15 aa, Artificial
  helical interface sequence
KSVMEELKRIIDDSE

SEQ ID NO: 13108 - protein, 9 aa, Artificial
  helical interface sequence
IDTILSSKL

SEQ ID NO: 13109 - protein, 22 aa, Artificial
  helical interface sequence
KESTQKAIDGVTNKVNSIIDKM

SEQ ID NO: 13110 - protein, 32 aa, Artificial; identical to SEQ ID NO: 6965
  helical interface sequence

SEQ ID NO: 13111 - protein, 17 aa, Artificial
  helical interface sequence
AQGALANIAVDKANLEI

SEQ ID NO: 13112 - protein, 15 aa, Artificial
  helical interface sequence
SDGFKSAISEVSTVT

SEQ ID NO: 13113 - protein, 16 aa, Artificial
  helical interface sequence
LTELLQGYTVEVLRQQ

SEQ ID NO: 13114 - protein, 9 aa, Artificial
  helical interface sequence
LLRGIYAYG

SEQ ID NO: 13115 - protein, 13 aa, Artificial
  helical interface sequence
DDIRILRDIEQYY

SEQ ID NO: 13116 - protein, 13 aa, Artificial
  helical interface sequence
IENVKAKIQDKEG

SEQ ID NO: 13117 - protein, 7 aa, Artificial
  helical interface sequence
YELTKSS

SEQ ID NO: 13118 - protein, 29 aa, Artificial
  helical interface sequence
PDEFRQAFDLAVKGINIIYNLEREALKSK

SEQ ID NO: 13119 - protein, 27 aa, Artificial
  helical interface sequence
SEHYDVARGVQKILQDYKSLQDIIAIL

SEQ ID NO: 13120 - protein, 16 aa, Artificial
  helical interface sequence
PDLRDRGYIYWRLLST

SEQ ID NO: 13121 - protein, 9 aa, Artificial
  helical interface sequence
FTSRTSACG

SEQ ID NO: 13122 - protein, 17 aa, Artificial
  helical interface sequence
SPKEVMFLNELEEILDV

SEQ ID NO: 13123 - protein, 12 aa, Artificial
  helical interface sequence
SREIQTAVRLLL

SEQ ID NO: 13124 - protein, 6 aa, Artificial
  helical interface sequence
TSIEER

SEQ ID NO: 13125 - protein, 18 aa, Artificial
  helical interface sequence
PIRLGLALNFSVFYYEIL

SEQ ID NO: 13126 - protein, 7 aa, Artificial
  helical interface sequence
LYQLENY

SEQ ID NO: 13127 - protein, 5 aa, Artificial
  helical interface sequence
IVEQC

SEQ ID NO: 13128 - protein, 16 aa, Artificial
  helical interface sequence
KGLLDVTCKTVANMIK

SEQ ID NO: 13129 - protein, 11 aa, Artificial
  helical interface sequence
EEEEAQVRKEN

SEQ ID NO: 13130 - protein, 21 aa, Artificial
  helical interface sequence
WGRIVAFFSFGGALCVESVDK

SEQ ID NO: 13131 - protein, 22 aa, Artificial
  helical interface sequence
LERTRAELDTVCRYNYEETEVP

SEQ ID NO: 13132 - protein, 15 aa, Artificial
  helical interface sequence
VADMLVKVNALIKDR

SEQ ID NO: 13133 - protein, 17 aa, Artificial
  helical interface sequence
DSEFKHALARNLRSLTR

SEQ ID NO: 13134 - protein, 13 aa, Artificial
  helical interface sequence
GGDVLQWITQRLW

SEQ ID NO: 13135 - protein, 17 aa, Artificial
  helical interface sequence
GIALSRLAQERKAWRKD

SEQ ID NO: 13136 - protein, 9 aa, Artificial
  helical interface sequence
FTSRTSACG

SEQ ID NO: 13137 - protein, 6 aa, Artificial
  helical interface sequence
ISQLLS

SEQ ID NO: 13138 - protein, 5 aa, Artificial
  helical interface sequence
RLLDN

SEQ ID NO: 13139 - protein, 10 aa, Artificial
  helical interface sequence
QIMEGIAGKY

SEQ ID NO: 13140 - protein, 13 aa, Artificial
  helical interface sequence
YAFKLLIQELMSM

SEQ ID NO: 13141 - protein, 7 aa, Artificial
  helical interface sequence
GKALLLL

SEQ ID NO: 13142 - protein, 11 aa, Artificial
  helical interface sequence
FASVEHIMRNV

SEQ ID NO: 13143 - protein, 32 aa, Artificial; identical to SEQ ID NO: 462
  helical interface sequence

SEQ ID NO: 13144 - protein, 32 aa, Artificial; identical to SEQ ID NO: 462
  helical interface sequence

SEQ ID NO: 13145 - protein, 11 aa, Artificial
  helical interface sequence
FASVEHIMRNV

SEQ ID NO: 13146 - protein, 29 aa, Artificial
  helical interface sequence
RRDFLYYATAGAGAVATGAAVWPLINQMN

SEQ ID NO: 13147 - protein, 11 aa, Artificial
  helical interface sequence
IGHSIQTWLLG

SEQ ID NO: 13148 - protein, 11 aa, Artificial
  helical interface sequence
IGHSIQTWLLG

SEQ ID NO: 13149 - protein, 11 aa, Artificial
  helical interface sequence
IGHSIQTWLLG

SEQ ID NO: 13150 - protein, 10 aa, Artificial
  helical interface sequence
RIKVREAAMR

SEQ ID NO: 13151 - protein, 13 aa, Artificial
  helical interface sequence
PLNAFDGALLNAG

SEQ ID NO: 13152 - protein, 15 aa, Artificial
  helical interface sequence
TVSALASIGLGLLGK

SEQ ID NO: 13153 - protein, 7 aa, Artificial
  helical interface sequence
DEQLKSG

SEQ ID NO: 13154 - protein, 17 aa, Artificial
  helical interface sequence
EETEQINKHFHNTLEHL

SEQ ID NO: 13155 - protein, 13 aa, Artificial
  helical interface sequence
SFEFALAIVEALN

SEQ ID NO: 13156 - protein, 7 aa, Artificial
  helical interface sequence
SEQLTSG

SEQ ID NO: 13157 - protein, 32 aa, Artificial; identical to SEQ ID NO: 6699
  helical interface sequence

SEQ ID NO: 13158 - protein, 13 aa, Artificial
  helical interface sequence
ANKRLDAVNRITA

SEQ ID NO: 13159 - protein, 7 aa, Artificial
  helical interface sequence
PPCILNN

SEQ ID NO: 13160 - protein, 9 aa, Artificial
  helical interface sequence
LSRLLSYAG

SEQ ID NO: 13161 - protein, 7 aa, Artificial
  helical interface sequence
AAKDVFL

SEQ ID NO: 13162 - protein, 16 aa, Artificial
  helical interface sequence
SGGIFLLQMPKILDHF

SEQ ID NO: 13163 - protein, 16 aa, Artificial
  helical interface sequence
AIDAAVAIQFALNVTE

SEQ ID NO: 13164 - protein, 9 aa, Artificial
  helical interface sequence
IEAEVVNRC

SEQ ID NO: 13165 - protein, 9 aa, Artificial
  helical interface sequence
PAPATTFAH

SEQ ID NO: 13166 - protein, 24 aa, Artificial
  helical interface sequence
RAMKQVAGTMKLELAQYREVAAFA

SEQ ID NO: 13167 - protein, 8 aa, Artificial
  helical interface sequence
VCKNYAEA

SEQ ID NO: 13168 - protein, 31 aa, Artificial
  helical interface sequence
AFKLESLEAKNRALNEQIARLEQERSTANKA

SEQ ID NO: 13169 - protein, 12 aa, Artificial
  helical interface sequence
PWLSVKLLRLLQ

SEQ ID NO: 13170 - protein, 7 aa, Artificial
  helical interface sequence
ELDLVFN

SEQ ID NO: 13171 - protein, 18 aa, Artificial
  helical interface sequence
NTLLIVQHANVVKAARDA

SEQ ID NO: 13172 - protein, 9 aa, Artificial
  helical interface sequence
YEEFVQMMT

SEQ ID NO: 13173 - protein, 6 aa, Artificial
  helical interface sequence
ENMRRP

SEQ ID NO: 13174 - protein, 8 aa, Artificial
  helical interface sequence
LNEIALNE

SEQ ID NO: 13175 - protein, 5 aa, Artificial
  helical interface sequence
SEVIH

SEQ ID NO: 13176 - protein, 11 aa, Artificial
  helical interface sequence
SHLVEALYLVC

SEQ ID NO: 13177 - protein, 11 aa, Artificial
  helical interface sequence
EEEKDKWRRKV

SEQ ID NO: 13178 - protein, 11 aa, Artificial
  helical interface sequence
DLAAEAVVLHY

SEQ ID NO: 13179 - protein, 21 aa, Artificial
  helical interface sequence
TYYKRTIKISGQKAMYALKSK

SEQ ID NO: 13180 - protein, 17 aa, Artificial
  helical interface sequence
EYQNEKLANELKSLLDE

SEQ ID NO: 13181 - protein, 21 aa, Artificial
  helical interface sequence
TYYKRTIKISGQKAMYALKSK

SEQ ID NO: 13182 - protein, 5 aa, Artificial
  helical interface sequence
VKDME

SEQ ID NO: 13183 - protein, 12 aa, Artificial
  helical interface sequence
VATWIFTIARNR

SEQ ID NO: 13184 - protein, 5 aa, Artificial
  helical interface sequence
RSLTT

SEQ ID NO: 13185 - protein, 13 aa, Artificial
  helical interface sequence
IDDKIHFSFQLYD

SEQ ID NO: 13186 - protein, 15 aa, Artificial
  helical interface sequence
PEFRVQFQDMCATIG

SEQ ID NO: 13187 - protein, 11 aa, Artificial
  helical interface sequence
ATDITRGGRLS

SEQ ID NO: 13188 - protein, 14 aa, Artificial
  helical interface sequence
VAAIFRFLLFFQGF

SEQ ID NO: 13189 - protein, 7 aa, Artificial
  helical interface sequence
LAYDVFG

SEQ ID NO: 13190 - protein, 13 aa, Artificial
  helical interface sequence
AKQQVETFLEQLK

SEQ ID NO: 13191 - protein, 10 aa, Artificial
  helical interface sequence
SRTREILTKT

SEQ ID NO: 13192 - protein, 12 aa, Artificial
  helical interface sequence
FHSTVINHYRMR

SEQ ID NO: 13193 - protein, 12 aa, Artificial
  helical interface sequence
SCHMRQATCFLG

SEQ ID NO: 13194 - protein, 37 aa, Artificial
  helical interface sequence
SLQQEYKKQMLTAAHALAVDAKNLLDVIDQARLKMLG

SEQ ID NO: 13195 - protein, 6 aa, Artificial
  helical interface sequence
EIHGKL

SEQ ID NO: 13196 - protein, 19 aa, Artificial
  helical interface sequence
ISHAIEMLLDLIMKRMERS

SEQ ID NO: 13197 - protein, 7 aa, Artificial
  helical interface sequence
RSLTTAF

SEQ ID NO: 13198 - protein, 8 aa, Artificial
  helical interface sequence
KLIMKERR

SEQ ID NO: 13199 - protein, 9 aa, Artificial
  helical interface sequence
EHVVDTCRK

SEQ ID NO: 13200 - protein, 11 aa, Artificial
  helical interface sequence
EHVVDTCRKFI

SEQ ID NO: 13201 - protein, 11 aa, Artificial
  helical interface sequence
VDNASMQAVAK

SEQ ID NO: 13202 - protein, 16 aa, Artificial
  helical interface sequence
LLDRIISHIDQFFIRH

SEQ ID NO: 13203 - protein, 6 aa, Artificial
  helical interface sequence
GLALKY

SEQ ID NO: 13204 - protein, 5 aa, Artificial
  helical interface sequence
ICVAY

SEQ ID NO: 13205 - protein, 6 aa, Artificial
  helical interface sequence
RYQWDS

SEQ ID NO: 13206 - protein, 28 aa, Artificial
  helical interface sequence
TILFQLALAALVILSFVMVIGVPVAYAS

SEQ ID NO: 13207 - protein, 5 aa, Artificial
  helical interface sequence
DAILD

SEQ ID NO: 13208 - protein, 10 aa, Artificial
  helical interface sequence
RDERRKWIQC

SEQ ID NO: 13209 - protein, 15 aa, Artificial
  helical interface sequence
KWCLLTIILLMRALD

SEQ ID NO: 13210 - protein, 10 aa, Artificial
  helical interface sequence
SAESFAMIRG

SEQ ID NO: 13211 - protein, 22 aa, Artificial
  helical interface sequence
HVLEEKTVAGWVAENQTALLYL

SEQ ID NO: 13212 - protein, 8 aa, Artificial
  helical interface sequence
KEEYDESG

SEQ ID NO: 13213 - protein, 22 aa, Artificial
  helical interface sequence
VDTRQKQLAAWCSLVLSFCRLH

SEQ ID NO: 13214 - protein, 7 aa, Artificial
  helical interface sequence
YNRIRSG

SEQ ID NO: 13215 - protein, 14 aa, Artificial
  helical interface sequence
HPNRVLEHLHSTAF

SEQ ID NO: 13216 - protein, 33 aa, Artificial; identical to SEQ ID NO: 9213
  helical interface sequence

SEQ ID NO: 13217 - protein, 17 aa, Artificial
  helical interface sequence
TSQMAKDVTTFLNWCAE

SEQ ID NO: 13218 - protein, 15 aa, Artificial
  helical interface sequence
AQQIEAARVAMVRHF

SEQ ID NO: 13219 - protein, 25 aa, Artificial
  helical interface sequence
PVELEKLVREKKRELMELRFQASIG

SEQ ID NO: 13220 - protein, 22 aa, Artificial
  helical interface sequence
NYQVEEDIGKLKSCLTGFLQEY

SEQ ID NO: 13221 - protein, 25 aa, Artificial
  helical interface sequence
EEMTATCLRDLDYYLRLVTYGIVAG

SEQ ID NO: 13222 - protein, 12 aa, Artificial
  helical interface sequence
VFELKRIVEGIL

SEQ ID NO: 13223 - protein, 20 aa, Artificial
  helical interface sequence
PENFRLLGDILVIILAAHFG

SEQ ID NO: 13224 - protein, 15 aa, Artificial
  helical interface sequence
VEFVKHELNRLLSKN

SEQ ID NO: 13225 - protein, 14 aa, Artificial
  helical interface sequence
ESGIGGLAIGLALQ

SEQ ID NO: 13226 - protein, 14 aa, Artificial
  helical interface sequence
GDFYEGINFAGAFK

SEQ ID NO: 13227 - protein, 23 aa, Artificial
  helical interface sequence
ASLSEAVQAACMLRYQKCLDARS

SEQ ID NO: 13228 - protein, 23 aa, Artificial
  helical interface sequence
VKPIEDIQDNLLQALELQLKLNH

SEQ ID NO: 13229 - protein, 6 aa, Artificial
  helical interface sequence
KILEDN

SEQ ID NO: 13230 - protein, 15 aa, Artificial
  helical interface sequence
EMGFAGIAVGAAMAG

SEQ ID NO: 13231 - protein, 28 aa, Artificial
  helical interface sequence
REDGLKYYRMMQTVRRMELKADQLYKQK

SEQ ID NO: 13232 - protein, 12 aa, Artificial
  helical interface sequence
VKDIIFAIKKTL

SEQ ID NO: 13233 - protein, 17 aa, Artificial
  helical interface sequence
AQVPLGAGIALACKYNG

SEQ ID NO: 13234 - protein, 15 aa, Artificial
  helical interface sequence
EEKEAIFEGHIMLLE

SEQ ID NO: 13235 - protein, 15 aa, Artificial
  helical interface sequence
SDVDLSKYITTIAGV

SEQ ID NO: 13236 - protein, 9 aa, Artificial
  helical interface sequence
AVPRAILEL

SEQ ID NO: 13237 - protein, 13 aa, Artificial
  helical interface sequence
EAHSEFLKAASNL

SEQ ID NO: 13238 - protein, 12 aa, Artificial
  helical interface sequence
INEYKDYFQWKY

SEQ ID NO: 13239 - protein, 12 aa, Artificial
  helical interface sequence
PHLLWEVVRWQL

SEQ ID NO: 13240 - protein, 12 aa, Artificial
  helical interface sequence
RSTVAQLVQTLE

SEQ ID NO: 13241 - protein, 40 aa, Artificial; identical to SEQ ID NO: 836
  helical interface sequence

SEQ ID NO: 13242 - protein, 11 aa, Artificial
  helical interface sequence
DEELRAMIEEF

SEQ ID NO: 13243 - protein, 8 aa, Artificial
  helical interface sequence
VAWRNRCK

SEQ ID NO: 13244 - protein, 9 aa, Artificial
  helical interface sequence
LDLAKPRIY

SEQ ID NO: 13245 - protein, 6 aa, Artificial
  helical interface sequence
GVTLLQ

SEQ ID NO: 13246 - protein, 5 aa, Artificial
  helical interface sequence
ERMSG

SEQ ID NO: 13247 - protein, 6 aa, Artificial
  helical interface sequence
QSLEDI

SEQ ID NO: 13248 - protein, 9 aa, Artificial
  helical interface sequence
GCQLQEALL

SEQ ID NO: 13249 - protein, 11 aa, Artificial
  helical interface sequence
GCQLQEALLQQ

SEQ ID NO: 13250 - protein, 15 aa, Artificial
  helical interface sequence
LLALAQALERLSLLW

SEQ ID NO: 13251 - protein, 18 aa, Artificial
  helical interface sequence
FDIASDAFATFKDLLTRH

SEQ ID NO: 13252 - protein, 11 aa, Artificial
  helical interface sequence
REWVLKIAKLA

SEQ ID NO: 13253 - protein, 13 aa, Artificial
  helical interface sequence
IFEMYARTRDEGF

SEQ ID NO: 13254 - protein, 6 aa, Artificial
  helical interface sequence
LYKMRT

SEQ ID NO: 13255 - protein, 6 aa, Artificial
  helical interface sequence
SSDFEA

SEQ ID NO: 13256 - protein, 7 aa, Artificial
  helical interface sequence
PEYFIKG

SEQ ID NO: 13257 - protein, 13 aa, Artificial
  helical interface sequence
HTLGNLIAGTLRR

SEQ ID NO: 13258 - protein, 6 aa, Artificial
  helical interface sequence
TYDYLN

SEQ ID NO: 13259 - protein, 13 aa, Artificial
  helical interface sequence
YAFKLLIQELMSM

SEQ ID NO: 13260 - protein, 11 aa, Artificial
  helical interface sequence
EIIQNAQRDAV

SEQ ID NO: 13261 - protein, 10 aa, Artificial
  helical interface sequence
YCCRRMILTH

SEQ ID NO: 13262 - protein, 10 aa, Artificial
  helical interface sequence
YCCRRMILTH

SEQ ID NO: 13263 - protein, 7 aa, Artificial
  helical interface sequence
LIEKFLR

SEQ ID NO: 13264 - protein, 9 aa, Artificial
  helical interface sequence
VPLQIEKAC

SEQ ID NO: 13265 - protein, 16 aa, Artificial
  helical interface sequence
AQEFLKLLMERLHLEI

SEQ ID NO: 13266 - protein, 16 aa, Artificial
  helical interface sequence
AQEFLKLLMERLHLEI

SEQ ID NO: 13267 - protein, 17 aa, Artificial
  helical interface sequence
LKQLQSAMEQLDAGANA

SEQ ID NO: 13268 - protein, 5 aa, Artificial
  helical interface sequence
SEQLT

SEQ ID NO: 13269 - protein, 6 aa, Artificial
  helical interface sequence
SEQLTS

SEQ ID NO: 13270 - protein, 14 aa, Artificial
  helical interface sequence
EEMEDRLQALEKDK

SEQ ID NO: 13271 - protein, 14 aa, Artificial
  helical interface sequence
DEAQKKIFNLMEKD

SEQ ID NO: 13272 - protein, 29 aa, Artificial
  helical interface sequence
PEYWDGETRKVKAHSQTHRVDLGTLRGYY

SEQ ID NO: 13273 - protein, 12 aa, Artificial
  helical interface sequence
AMDVVYALKRQG

SEQ ID NO: 13274 - protein, 19 aa, Artificial
  helical interface sequence
ELAKHAVSEGTKAVTKYTS

SEQ ID NO: 13275 - protein, 14 aa, Artificial
  helical interface sequence
GEKRLRIAQILTDN

SEQ ID NO: 13276 - protein, 9 aa, Artificial
  helical interface sequence
GPVDEWGIA

SEQ ID NO: 13277 - protein, 14 aa, Artificial
  helical interface sequence
GNKRLDAVNYIVSN

SEQ ID NO: 13278 - protein, 17 aa, Artificial
  helical interface sequence
EKDKLKMEVDQLKKEVT

SEQ ID NO: 13279 - protein, 5 aa, Artificial
  helical interface sequence
TEQLA

SEQ ID NO: 13280 - protein, 21 aa, Artificial
  helical interface sequence
NWVPTAQLWGAVGAVGLVSAT

SEQ ID NO: 13281 - protein, 21 aa, Artificial
  helical interface sequence
NWVPTAQLWGAVGAVGLVSAT

SEQ ID NO: 13282 - protein, 13 aa, Artificial
  helical interface sequence
GQETAYFLLKLAG

SEQ ID NO: 13283 - protein, 10 aa, Artificial
  helical interface sequence
AEVLKQAQQE

SEQ ID NO: 13284 - protein, 5 aa, Artificial
  helical interface sequence
FQEFR

SEQ ID NO: 13285 - protein, 16 aa, Artificial
  helical interface sequence
ILNEGPEILRDAARWC

SEQ ID NO: 13286 - protein, 21 aa, Artificial
  helical interface sequence
RWFLVQIEELVRLEEKVAEVG

SEQ ID NO: 13287 - protein, 10 aa, Artificial
  helical interface sequence
PRDSSQIVQR

SEQ ID NO: 13288 - protein, 16 aa, Artificial
  helical interface sequence
DTDSEEEIREAFRVFD

SEQ ID NO: 13289 - protein, 12 aa, Artificial
  helical interface sequence
PLTEAVAAADSQ

SEQ ID NO: 13290 - protein, 13 aa, Artificial
  helical interface sequence
DNDIYRLAKILDE

SEQ ID NO: 13291 - protein, 9 aa, Artificial
  helical interface sequence
PIKVLHEAE

SEQ ID NO: 13292 - protein, 23 aa, Artificial
  helical interface sequence
QWLYSARGDFFRATSRLTTDFGN

SEQ ID NO: 13293 - protein, 14 aa, Artificial
  helical interface sequence
EAQRNGFIQSLKDD

SEQ ID NO: 13294 - protein, 10 aa, Artificial
  helical interface sequence
DKELTAMLKE

SEQ ID NO: 13295 - protein, 18 aa, Artificial
  helical interface sequence
QDEIDDLKDVFELFDFWD

SEQ ID NO: 13296 - protein, 10 aa, Artificial
  helical interface sequence
PDAIRAQIAA

SEQ ID NO: 13297 - protein, 5 aa, Artificial
  helical interface sequence
EEARK

SEQ ID NO: 13298 - protein, 6 aa, Artificial
  helical interface sequence
IETILK

SEQ ID NO: 13299 - protein, 11 aa, Artificial
  helical interface sequence
SVAANRRKHMS

SEQ ID NO: 13300 - protein, 6 aa, Artificial
  helical interface sequence
STRENV

SEQ ID NO: 13301 - protein, 13 aa, Artificial
  helical interface sequence
LDMAHETLEKRLG

SEQ ID NO: 13302 - protein, 15 aa, Artificial
  helical interface sequence
DKTRANLKKLKTLMS

SEQ ID NO: 13303 - protein, 7 aa, Artificial
  helical interface sequence
AEDIALT

SEQ ID NO: 13304 - protein, 6 aa, Artificial
  helical interface sequence
TANFAD

SEQ ID NO: 13305 - protein, 7 aa, Artificial
  helical interface sequence
VRDFKTL

SEQ ID NO: 13306 - protein, 8 aa, Artificial
  helical interface sequence
WYLWAVKH

SEQ ID NO: 13307 - protein, 26 aa, Artificial
  helical interface sequence
ALAIHRLGLFLALSAAFWSAVCILIS

SEQ ID NO: 13308 - protein, 6 aa, Artificial
  helical interface sequence
LKRIAS

SEQ ID NO: 13309 - protein, 10 aa, Artificial
  helical interface sequence
RVALQAEKLD

SEQ ID NO: 13310 - protein, 9 aa, Artificial
  helical interface sequence
GPMDDYLVA

SEQ ID NO: 13311 - protein, 20 aa, Artificial
  helical interface sequence
GYSANSQGKVAAAAVVVLLK

SEQ ID NO: 13312 - protein, 7 aa, Artificial
  helical interface sequence
AEMLTNN

SEQ ID NO: 13313 - protein, 7 aa, Artificial
  helical interface sequence
VKWYHFD

SEQ ID NO: 13314 - protein, 14 aa, Artificial
  helical interface sequence
YSGFYTFSLLDHHY

SEQ ID NO: 13315 - protein, 16 aa, Artificial
  helical interface sequence
KGLLDVTCKTVANMIK

SEQ ID NO: 13316 - protein, 11 aa, Artificial
  helical interface sequence
DELLLGIFSCL

SEQ ID NO: 13317 - protein, 11 aa, Artificial
  helical interface sequence
EFALQTLLSSC

SEQ ID NO: 13318 - protein, 6 aa, Artificial
  helical interface sequence
SDGFIS

SEQ ID NO: 13319 - protein, 12 aa, Artificial
  helical interface sequence
DTRDAWVNKIAQ

SEQ ID NO: 13320 - protein, 19 aa, Artificial
  helical interface sequence
KEETVDFIKHSLSQAIKWD

SEQ ID NO: 13321 - protein, 22 aa, Artificial
  helical interface sequence
AADTQAIADIVQYHLELYTSQY

SEQ ID NO: 13322 - protein, 15 aa, Artificial
  helical interface sequence
VVSALQMLKQHLFKY

SEQ ID NO: 13323 - protein, 20 aa, Artificial
  helical interface sequence
ISDMQHIERLLKDLVTENAY

SEQ ID NO: 13324 - protein, 22 aa, Artificial
  helical interface sequence
APDARVLSNYLRQQCNYSSLVF

SEQ ID NO: 13325 - protein, 11 aa, Artificial
  helical interface sequence
LWHLRSLVFTD

SEQ ID NO: 13326 - protein, 47 aa, Artificial; identical to SEQ ID NO: 1689
  helical interface sequence

SEQ ID NO: 13327 - protein, 16 aa, Artificial
  helical interface sequence
ADAFTLFELFERKLEM

SEQ ID NO: 13328 - protein, 7 aa, Artificial
  helical interface sequence
SLMQERY

SEQ ID NO: 13329 - protein, 17 aa, Artificial
  helical interface sequence
DAAVEANSYLDYAINAL

SEQ ID NO: 13330 - protein, 14 aa, Artificial
  helical interface sequence
SNKRLDVVNRITSN

SEQ ID NO: 13331 - protein, 5 aa, Artificial
  helical interface sequence
SLENH

SEQ ID NO: 13332 - protein, 29 aa, Artificial
  helical interface sequence
KNATYIRNLVLGAQYLHDHIVHFYHLHAL

SEQ ID NO: 13333 - protein, 12 aa, Artificial
  helical interface sequence
EDQAETLKAEVG

SEQ ID NO: 13334 - protein, 6 aa, Artificial
  helical interface sequence
EKIEKQ

SEQ ID NO: 13335 - protein, 22 aa, Artificial
  helical interface sequence
AQGALANIAVDKANLEIMTKRS

SEQ ID NO: 13336 - protein, 10 aa, Artificial
  helical interface sequence
YCRHNYGVGE

SEQ ID NO: 13337 - protein, 17 aa, Artificial
  helical interface sequence
GKEQRILAKTIKRARIL

SEQ ID NO: 13338 - protein, 19 aa, Artificial
  helical interface sequence
PVNFKFLGHCFLVVVAIHH

SEQ ID NO: 13339 - protein, 22 aa, Artificial
  helical interface sequence
ADAELQRLKNERHEEAELERLK

SEQ ID NO: 13340 - protein, 14 aa, Artificial
  helical interface sequence
EGVATYAAAVLFRM

SEQ ID NO: 13341 - protein, 7 aa, Artificial
  helical interface sequence
DEQLKSG

SEQ ID NO: 13342 - protein, 7 aa, Artificial
  helical interface sequence
NAEVMKV

SEQ ID NO: 13343 - protein, 9 aa, Artificial
  helical interface sequence
PDKDMEIME

SEQ ID NO: 13344 - protein, 9 aa, Artificial
  helical interface sequence
PDKDMEIME

SEQ ID NO: 13345 - protein, 14 aa, Artificial
  helical interface sequence
AKNYGRAVYECLRG

SEQ ID NO: 13346 - protein, 21 aa, Artificial
  helical interface sequence
NAPGAAANRVALEACTQARNE

SEQ ID NO: 13347 - protein, 15 aa, Artificial
  helical interface sequence
YGAYLAQPLLREVLE

SEQ ID NO: 13348 - protein, 8 aa, Artificial
  helical interface sequence
SFAQAEAR

SEQ ID NO: 13349 - protein, 11 aa, Artificial
  helical interface sequence
PEERLLRSIFG

SEQ ID NO: 13350 - protein, 13 aa, Artificial
  helical interface sequence
SLDMKYFCAVTTY

SEQ ID NO: 13351 - protein, 30 aa, Artificial
  helical interface sequence
GWDHVFLGLFWMYNCISVVIFHFSWKMQSD

SEQ ID NO: 13352 - protein, 22 aa, Artificial
  helical interface sequence
AADTEAVTQLIGSNIELHSLYT

SEQ ID NO: 13353 - protein, 13 aa, Artificial
  helical interface sequence
VGELFWKVKEEEG

SEQ ID NO: 13354 - protein, 14 aa, Artificial
  helical interface sequence
FGAHMANPLLRKVV

SEQ ID NO: 13355 - protein, 19 aa, Artificial
  helical interface sequence
KEETVDFIKHSLSQAIKWD

SEQ ID NO: 13356 - protein, 22 aa, Artificial
  helical interface sequence
AGDTVQFAEYIQANIQLYSIRE

SEQ ID NO: 13357 - protein, 6 aa, Artificial
  helical interface sequence
SEELET

SEQ ID NO: 13358 - protein, 6 aa, Artificial
  helical interface sequence
PVTEKH

SEQ ID NO: 13359 - protein, 12 aa, Artificial
  helical interface sequence
KPFLWLARKLIG

SEQ ID NO: 13360 - protein, 12 aa, Artificial
  helical interface sequence
KPFLWLARKLIG

SEQ ID NO: 13361 - protein, 31 aa, Artificial
  helical interface sequence
SGLTTFFKMVSMRDCKSWLRDFLMHRKKRLE

SEQ ID NO: 13362 - protein, 13 aa, Artificial
  helical interface sequence
LLDALGYIKDNLA

SEQ ID NO: 13363 - protein, 13 aa, Artificial
  helical interface sequence
LLDALGYIKDNLA

SEQ ID NO: 13364 - protein, 22 aa, Artificial
  helical interface sequence
AQGALANIAVDKANLEIMTKRS

SEQ ID NO: 13365 - protein, 37 aa, Artificial
  helical interface sequence
EEERQEALRQAEEERKAKYAKMEAEREVMRQGIRDKY

SEQ ID NO: 13366 - protein, 10 aa, Artificial
  helical interface sequence
AEAYTIYCQN

SEQ ID NO: 13367 - protein, 10 aa, Artificial
  helical interface sequence
PIMQTALRRL

SEQ ID NO: 13368 - protein, 23 aa, Artificial
  helical interface sequence
ELLDTERAYVEELLCVLEGYAAE

SEQ ID NO: 13369 - protein, 22 aa, Artificial
  helical interface sequence
EFQIYEKYCQNKPRSESLWRQC

SEQ ID NO: 13370 - protein, 7 aa, Artificial
  helical interface sequence
AGKLKRK

SEQ ID NO: 13371 - protein, 17 aa, Artificial
  helical interface sequence
HIPFAFAFAILAYLTLV

SEQ ID NO: 13372 - protein, 28 aa, Artificial
  helical interface sequence
GLWQIITICATGAFVSWALREVEICRKL

SEQ ID NO: 13373 - protein, 39 aa, Artificial; identical to SEQ ID NO: 9993
  helical interface sequence

SEQ ID NO: 13374 - protein, 5 aa, Artificial
  helical interface sequence
LKDVV

SEQ ID NO: 13375 - protein, 5 aa, Artificial
  helical interface sequence
DYKIW

SEQ ID NO: 13376 - protein, 5 aa, Artificial
  helical interface sequence
DYKIW

SEQ ID NO: 13377 - protein, 5 aa, Artificial
  helical interface sequence
DYKIW

SEQ ID NO: 13378 - protein, 5 aa, Artificial
  helical interface sequence
DYKIW

SEQ ID NO: 13379 - protein, 5 aa, Artificial
  helical interface sequence
LKEFV

SEQ ID NO: 13380 - protein, 12 aa, Artificial
  helical interface sequence
VFELKRIVEGIL

SEQ ID NO: 13381 - protein, 5 aa, Artificial
  helical interface sequence
KPTLQ

SEQ ID NO: 13382 - protein, 20 aa, Artificial
  helical interface sequence
EKSTVLQSELESCKELQELE

SEQ ID NO: 13383 - protein, 15 aa, Artificial
  helical interface sequence
ENIQRVAAGVLCELA

SEQ ID NO: 13384 - protein, 19 aa, Artificial
  helical interface sequence
PEEMYIQQKVRVLLMLRKM

SEQ ID NO: 13385 - protein, 15 aa, Artificial
  helical interface sequence
DKKLAKLIDEVETLF

SEQ ID NO: 13386 - protein, 6 aa, Artificial
  helical interface sequence
FIFQKM

SEQ ID NO: 13387 - protein, 28 aa, Artificial
  helical interface sequence
ESIQKKCEEVIAKYKPEWEAVVAKYRPR

SEQ ID NO: 13388 - protein, 17 aa, Artificial
  helical interface sequence
ASLTKERGRLVDMMTDS

SEQ ID NO: 13389 - protein, 28 aa, Artificial
  helical interface sequence
ESIQKKCEEVIAKYKPEWEAVVAKYRPR

SEQ ID NO: 13390 - protein, 26 aa, Artificial
  helical interface sequence
TWRIMTTLNMLGGRQVIAAVKWAKAI

SEQ ID NO: 13391 - protein, 11 aa, Artificial
  helical interface sequence
TEDFVKAFQVF

SEQ ID NO: 13392 - protein, 17 aa, Artificial
  helical interface sequence
PVATQIHWLDGFILVII

SEQ ID NO: 13393 - protein, 33 aa, Artificial
  helical interface sequence
PASAKFLNTDLNNAFWTQQKYFTPVLGYLFEYG

SEQ ID NO: 13394 - protein, 16 aa, Artificial
  helical interface sequence
QGCCSYHRTVLSRHFK

SEQ ID NO: 13395 - protein, 33 aa, Artificial; identical to SEQ ID NO: 3616
  helical interface sequence

SEQ ID NO: 13396 - protein, 14 aa, Artificial
  helical interface sequence
PYSVACALGVLAAG

SEQ ID NO: 13397 - protein, 23 aa, Artificial
  helical interface sequence
DNDYLWIEAKLEEKVAVLKARAF

SEQ ID NO: 13398 - protein, 13 aa, Artificial
  helical interface sequence
KSARLAVEGLWQE

SEQ ID NO: 13399 - protein, 39 aa, Artificial; identical to SEQ ID NO: 11227
  helical interface sequence

SEQ ID NO: 13400 - protein, 29 aa, Artificial
  helical interface sequence
PEYWERETQKAKGNEQSFRVSLRTLLGYY

SEQ ID NO: 13401 - protein, 17 aa, Artificial
  helical interface sequence
PYLIAFLVDIYEDMLEN

SEQ ID NO: 13402 - protein, 16 aa, Artificial
  helical interface sequence
EKFRDVYDYFRAVLQR

SEQ ID NO: 13403 - protein, 8 aa, Artificial
  helical interface sequence
EAEIRFGI

SEQ ID NO: 13404 - protein, 35 aa, Artificial
  helical interface sequence
STVAGSLRSMKSVLEHLRAKMQRMEEAIKTQKELC

SEQ ID NO: 13405 - protein, 5 aa, Artificial
  helical interface sequence
SEQLT

SEQ ID NO: 13406 - protein, 13 aa, Artificial
  helical interface sequence
YVRLASRAAEIVA

SEQ ID NO: 13407 - protein, 7 aa, Artificial
  helical interface sequence
GVLVNNR

SEQ ID NO: 13408 - protein, 21 aa, Artificial
  helical interface sequence
PQVCAKLFGNIQKVVNFWLLH

SEQ ID NO: 13409 - protein, 11 aa, Artificial
  helical interface sequence
EETRAELSQLC

SEQ ID NO: 13410 - protein, 13 aa, Artificial
  helical interface sequence
SEEEIREAFRVFD

SEQ ID NO: 13411 - protein, 7 aa, Artificial
  helical interface sequence
AAELRHV

SEQ ID NO: 13412 - protein, 7 aa, Artificial
  helical interface sequence
FEESFLK

SEQ ID NO: 13413 - protein, 15 aa, Artificial
  helical interface sequence
TTPVCEDIGRSLLTY

SEQ ID NO: 13414 - protein, 22 aa, Artificial
  helical interface sequence
AEIITATQARCRGFLMRVEYRA

SEQ ID NO: 13415 - protein, 15 aa, Artificial
  helical interface sequence
PDVFEASVSALIAAH

SEQ ID NO: 13416 - protein, 18 aa, Artificial
  helical interface sequence
SEADEMAKALEAELNDLM

SEQ ID NO: 13417 - protein, 11 aa, Artificial
  helical interface sequence
GADVVAHAHRL

SEQ ID NO: 13418 - protein, 12 aa, Artificial
  helical interface sequence
QHKVASLVSRYV

SEQ ID NO: 13419 - protein, 5 aa, Artificial
  helical interface sequence
LKARC

SEQ ID NO: 13420 - protein, 8 aa, Artificial
  helical interface sequence
PLLSEIWD

SEQ ID NO: 13421 - protein, 14 aa, Artificial
  helical interface sequence
GNKRLDVVNRITSN

SEQ ID NO: 13422 - protein, 7 aa, Artificial
  helical interface sequence
LYQLENY

SEQ ID NO: 13423 - protein, 5 aa, Artificial
  helical interface sequence
PSDTV

SEQ ID NO: 13424 - protein, 7 aa, Artificial
  helical interface sequence
SEQLTSG

SEQ ID NO: 13425 - protein, 12 aa, Artificial
  helical interface sequence
AELVDALQFVCG

SEQ ID NO: 13426 - protein, 8 aa, Artificial
  helical interface sequence
VQLRRKLE

SEQ ID NO: 13427 - protein, 14 aa, Artificial
  helical interface sequence
MEGIHRWAIWMAVL

SEQ ID NO: 13428 - protein, 23 aa, Artificial
  helical interface sequence
AGIAIELVRLFAVELEHYEKIEG

SEQ ID NO: 13429 - protein, 6 aa, Artificial
  helical interface sequence
AFSRVV

SEQ ID NO: 13430 - protein, 11 aa, Artificial
  helical interface sequence
EETIRNAFAMF

SEQ ID NO: 13431 - protein, 11 aa, Artificial
  helical interface sequence
DEDVDEIIKLT

SEQ ID NO: 13432 - protein, 7 aa, Artificial
  helical interface sequence
LIGEIAS

SEQ ID NO: 13433 - protein, 6 aa, Artificial
  helical interface sequence
SADWYN

SEQ ID NO: 13434 - protein, 15 aa, Artificial
  helical interface sequence
HASDVLLNLNRLRSR

SEQ ID NO: 13435 - protein, 19 aa, Artificial
  helical interface sequence
FKEKLKWTGIVLVLYFIMG

SEQ ID NO: 13436 - protein, 8 aa, Artificial
  helical interface sequence
VQLRKKLE

SEQ ID NO: 13437 - protein, 10 aa, Artificial
  helical interface sequence
LLDYLRETVG

SEQ ID NO: 13438 - protein, 10 aa, Artificial
  helical interface sequence
YEELREQLSS

SEQ ID NO: 13439 - protein, 29 aa, Artificial
  helical interface sequence
QRAREEFRPTIYSNVIKGMRVLVDAREKL

SEQ ID NO: 13440 - protein, 6 aa, Artificial
  helical interface sequence
SEELET

SEQ ID NO: 13441 - protein, 5 aa, Artificial
  helical interface sequence
AREQW

SEQ ID NO: 13442 - protein, 6 aa, Artificial
  helical interface sequence
SEQLTS

SEQ ID NO: 13443 - protein, 9 aa, Artificial
  helical interface sequence
KLFLEMLEA

SEQ ID NO: 13444 - protein, 6 aa, Artificial
  helical interface sequence
RCAHNC

SEQ ID NO: 13445 - protein, 19 aa, Artificial
  helical interface sequence
DNVMTAEMRKIAMAAVLSG

SEQ ID NO: 13446 - protein, 5 aa, Artificial
  helical interface sequence
FEKKQ

SEQ ID NO: 13447 - protein, 10 aa, Artificial
  helical interface sequence
VNTGQISIRH

SEQ ID NO: 13448 - protein, 32 aa, Artificial; identical to SEQ ID NO: 7621
  helical interface sequence

SEQ ID NO: 13449 - protein, 17 aa, Artificial
  helical interface sequence
YGRLIGLISFGGFVAAK

SEQ ID NO: 13450 - protein, 7 aa, Artificial
  helical interface sequence
KQIRLIE

SEQ ID NO: 13451 - protein, 14 aa, Artificial
  helical interface sequence
AKNYGRAVYECLRG

SEQ ID NO: 13452 - protein, 14 aa, Artificial
  helical interface sequence
AKNYGRAVYECLRG

SEQ ID NO: 13453 - protein, 14 aa, Artificial
  helical interface sequence
DEQIAAQVDYIVAN

SEQ ID NO: 13454 - protein, 14 aa, Artificial
  helical interface sequence
ISWVSTWDDRRAEG

SEQ ID NO: 13455 - protein, 12 aa, Artificial
  helical interface sequence
AWELRKGMNTLV

SEQ ID NO: 13456 - protein, 29 aa, Artificial
  helical interface sequence
GWLIRSIHRWSASMMVLMMILHVFRVYLT

SEQ ID NO: 13457 - protein, 26 aa, Artificial
  helical interface sequence
EMLYAALLSFGLIFVGWGLGVLLLKI

SEQ ID NO: 13458 - protein, 11 aa, Artificial
  helical interface sequence
STAIREISLLK

SEQ ID NO: 13459 - protein, 12 aa, Artificial
  helical interface sequence
EETRAELSQLCA

SEQ ID NO: 13460 - protein, 20 aa, Artificial
  helical interface sequence
WRDRFVFCAEAIYKSQAETG

SEQ ID NO: 13461 - protein, 20 aa, Artificial
  helical interface sequence
DVLKELERLKVEIQRLEAML

SEQ ID NO: 13462 - protein, 5 aa, Artificial
  helical interface sequence
QYIRR

SEQ ID NO: 13463 - protein, 5 aa, Artificial
  helical interface sequence
IFERS

SEQ ID NO: 13464 - protein, 11 aa, Artificial
  helical interface sequence
EEEIREMLRRV

SEQ ID NO: 13465 - protein, 31 aa, Artificial
  helical interface sequence
PCEIKRQEVINELFYTERAHVRTLKVLDQVF

SEQ ID NO: 13466 - protein, 22 aa, Artificial
  helical interface sequence
IIPTQMQRLTKYPLLLDNIAKY

SEQ ID NO: 13467 - protein, 5 aa, Artificial
  helical interface sequence
PITKA

SEQ ID NO: 13468 - protein, 22 aa, Artificial
  helical interface sequence
PVTNICQAADKQLFTLVEWAKR

SEQ ID NO: 13469 - protein, 8 aa, Artificial
  helical interface sequence
ADEAKTLI

SEQ ID NO: 13470 - protein, 12 aa, Artificial
  helical interface sequence
QKLQALQRVLQS

SEQ ID NO: 13471 - protein, 16 aa, Artificial
  helical interface sequence
AGEYGAEALERMFLGF

SEQ ID NO: 13472 - protein, 8 aa, Artificial
  helical interface sequence
PLEWQDYI

SEQ ID NO: 13473 - protein, 7 aa, Artificial
  helical interface sequence
FFAENEQ

SEQ ID NO: 13474 - protein, 14 aa, Artificial
  helical interface sequence
IVIKREMVSQYLHT

SEQ ID NO: 13475 - protein, 10 aa, Artificial
  helical interface sequence
LFEQMLVDMN

SEQ ID NO: 13476 - protein, 16 aa, Artificial
  helical interface sequence
LSLALYVFDEYLQKTV

SEQ ID NO: 13477 - protein, 16 aa, Artificial
  helical interface sequence
LSLALYVFDEYLQKTV

SEQ ID NO: 13478 - protein, 22 aa, Artificial
  helical interface sequence
AADGDALVKRFKNSVKWYHFDH

SEQ ID NO: 13479 - protein, 18 aa, Artificial
  helical interface sequence
VQVAEEAIVNAMRVLYYR

SEQ ID NO: 13480 - protein, 23 aa, Artificial
  helical interface sequence
TADARSMIEHARTAAVTHNLYYD

SEQ ID NO: 13481 - protein, 13 aa, Artificial
  helical interface sequence
TVALREIRRYQKS

SEQ ID NO: 13482 - protein, 17 aa, Artificial
  helical interface sequence
MYDIGAVAMRLLTKYMN

SEQ ID NO: 13483 - protein, 5 aa, Artificial
  helical interface sequence
IMGLM

SEQ ID NO: 13484 - protein, 19 aa, Artificial
  helical interface sequence
PSNFKILNHCILVVISTMF

SEQ ID NO: 13485 - protein, 27 aa, Artificial
  helical interface sequence
FEAGKRSAKISFVITVVLSLLAGVLVW

SEQ ID NO: 13486 - protein, 6 aa, Artificial
  helical interface sequence
CPIGLI

SEQ ID NO: 13487 - protein, 6 aa, Artificial
  helical interface sequence
CPIGLI

SEQ ID NO: 13488 - protein, 12 aa, Artificial
  helical interface sequence
SHEVVAWIKRIL

SEQ ID NO: 13489 - protein, 28 aa, Artificial
  helical interface sequence
PRSWLATSHFVLAFFFLVGHLWHAGRAR

SEQ ID NO: 13490 - protein, 9 aa, Artificial
  helical interface sequence
AIHGATVEN

SEQ ID NO: 13491 - protein, 8 aa, Artificial
  helical interface sequence
KLTRMLTF

SEQ ID NO: 13492 - protein, 9 aa, Artificial
  helical interface sequence
YEEFVQMMT

SEQ ID NO: 13493 - protein, 15 aa, Artificial
  helical interface sequence
QASLLRLHHRFRALD

SEQ ID NO: 13494 - protein, 11 aa, Artificial
  helical interface sequence
KAALQDALLNL

SEQ ID NO: 13495 - protein, 17 aa, Artificial
  helical interface sequence
NAIELARVVDRSLRDSK

SEQ ID NO: 13496 - protein, 21 aa, Artificial
  helical interface sequence
QKVARMFVNTAPKAIRELAAW

SEQ ID NO: 13497 - protein, 8 aa, Artificial
  helical interface sequence
LSEINRSF

SEQ ID NO: 13498 - protein, 5 aa, Artificial
  helical interface sequence
AKAAL

SEQ ID NO: 13499 - protein, 12 aa, Artificial
  helical interface sequence
FEELKQRVERLY

SEQ ID NO: 13500 - protein, 8 aa, Artificial
  helical interface sequence
QVDAEEKE

SEQ ID NO: 13501 - protein, 10 aa, Artificial
  helical interface sequence
HVLAKLMVKK

SEQ ID NO: 13502 - protein, 6 aa, Artificial
  helical interface sequence
GVFQLL

SEQ ID NO: 13503 - protein, 7 aa, Artificial
  helical interface sequence
FAALLRL

SEQ ID NO: 13504 - protein, 8 aa, Artificial
  helical interface sequence
HTLFRAYT

SEQ ID NO: 13505 - protein, 9 aa, Artificial
  helical interface sequence
LGTVMRSLG

SEQ ID NO: 13506 - protein, 9 aa, Artificial
  helical interface sequence
LGTVMRSLG

SEQ ID NO: 13507 - protein, 8 aa, Artificial
  helical interface sequence
PRQVLKEF

SEQ ID NO: 13508 - protein, 11 aa, Artificial
  helical interface sequence
TASVNCAKKIV

SEQ ID NO: 13509 - protein, 19 aa, Artificial
  helical interface sequence
NADISQSLLQTFIGRFRRI

SEQ ID NO: 13510 - protein, 6 aa, Artificial
  helical interface sequence
LTDLAL

SEQ ID NO: 13511 - protein, 13 aa, Artificial
  helical interface sequence
TVALREIRRYQKS

SEQ ID NO: 13512 - protein, 11 aa, Artificial
  helical interface sequence
FPHYVAVVKSL

SEQ ID NO: 13513 - protein, 16 aa, Artificial
  helical interface sequence
NLGTQTLMDWVAKTMK

SEQ ID NO: 13514 - protein, 6 aa, Artificial
  helical interface sequence
AFHSGE

SEQ ID NO: 13515 - protein, 5 aa, Artificial
  helical interface sequence
PEAKK

SEQ ID NO: 13516 - protein, 5 aa, Artificial
  helical interface sequence
PEAKK

SEQ ID NO: 13517 - protein, 7 aa, Artificial
  helical interface sequence
EEFGRFA

SEQ ID NO: 13518 - protein, 12 aa, Artificial
  helical interface sequence
IMPLLRRVQQEE

SEQ ID NO: 13519 - protein, 17 aa, Artificial
  helical interface sequence
RRAADRLEQAIKEARAR

SEQ ID NO: 13520 - protein, 5 aa, Artificial
  helical interface sequence
CEEAC

SEQ ID NO: 13521 - protein, 5 aa, Artificial
  helical interface sequence
CEEAC

SEQ ID NO: 13522 - protein, 5 aa, Artificial
  helical interface sequence
RDFLY

SEQ ID NO: 13523 - protein, 11 aa, Artificial
  helical interface sequence
IGHSIQTWLLG

SEQ ID NO: 13524 - protein, 5 aa, Artificial
  helical interface sequence
RDFLY

SEQ ID NO: 13525 - protein, 49 aa, Artificial; identical to SEQ ID NO: 3468
  helical interface sequence

SEQ ID NO: 13526 - protein, 6 aa, Artificial
  helical interface sequence
SEQLTS

SEQ ID NO: 13527 - protein, 15 aa, Artificial
  helical interface sequence
HDHVAWAFARKANEM

SEQ ID NO: 13528 - protein, 15 aa, Artificial
  helical interface sequence
FHVIQEQMAAAVELF

SEQ ID NO: 13529 - protein, 48 aa, Artificial; identical to SEQ ID NO: 5760
  helical interface sequence

SEQ ID NO: 13530 - protein, 13 aa, Artificial
  helical interface sequence
ALVRSITCWTLSR

SEQ ID NO: 13531 - protein, 15 aa, Artificial
  helical interface sequence
ENIHSGFKELLTAFN

SEQ ID NO: 13532 - protein, 26 aa, Artificial
  helical interface sequence
VEGDKKIYNAEVAEWDKLRQRLLDAR

SEQ ID NO: 13533 - protein, 7 aa, Artificial
  helical interface sequence
EELNKLL

SEQ ID NO: 13534 - protein, 11 aa, Artificial
  helical interface sequence
AMDVVYALKRQ

SEQ ID NO: 13535 - protein, 12 aa, Artificial
  helical interface sequence
YAAYLNVAAQAI

SEQ ID NO: 13536 - protein, 8 aa, Artificial
  helical interface sequence
RETAASLL

SEQ ID NO: 13537 - protein, 9 aa, Artificial
  helical interface sequence
ANAILRYVM

SEQ ID NO: 13538 - protein, 8 aa, Artificial
  helical interface sequence
VAWRNRCK

SEQ ID NO: 13539 - protein, 16 aa, Artificial
  helical interface sequence
KEEMMDIVKAIYDMMG

SEQ ID NO: 13540 - protein, 17 aa, Artificial
  helical interface sequence
EEHKIFLLKVLLPLHKV

SEQ ID NO: 13541 - protein, 7 aa, Artificial
  helical interface sequence
RTIESIL

SEQ ID NO: 13542 - protein, 52 aa, Artificial; identical to SEQ ID NO: 499
  helical interface sequence

SEQ ID NO: 13543 - protein, 7 aa, Artificial
  helical interface sequence
YMRIRSD

SEQ ID NO: 13544 - protein, 32 aa, Artificial; identical to SEQ ID NO: 6965
  helical interface sequence

SEQ ID NO: 13545 - protein, 20 aa, Artificial
  helical interface sequence
EDESYARAYRIIRAHQTELT

SEQ ID NO: 13546 - protein, 9 aa, Artificial
  helical interface sequence
RPDAEYWNS

SEQ ID NO: 13547 - protein, 18 aa, Artificial
  helical interface sequence
WWFRSLLVKGVYLIKRYY

SEQ ID NO: 13548 - protein, 16 aa, Artificial
  helical interface sequence
ISTLDFEIRHQLTQIH

SEQ ID NO: 13549 - protein, 5 aa, Artificial
  helical interface sequence
TRDMA

SEQ ID NO: 13550 - protein, 6 aa, Artificial
  helical interface sequence
SEQLTS

SEQ ID NO: 13551 - protein, 8 aa, Artificial
  helical interface sequence
ELMDLLIS

SEQ ID NO: 13552 - protein, 11 aa, Artificial
  helical interface sequence
EAELQDMINEV

SEQ ID NO: 13553 - protein, 24 aa, Artificial
  helical interface sequence
EERVKNGIERLTKAIKEAKGASRQ

SEQ ID NO: 13554 - protein, 11 aa, Artificial
  helical interface sequence
TLNLRYTRVAL

SEQ ID NO: 13555 - protein, 6 aa, Artificial
  helical interface sequence
CADCHM

SEQ ID NO: 13556 - protein, 10 aa, Artificial
  helical interface sequence
NPVGVTHKLS

SEQ ID NO: 13557 - protein, 5 aa, Artificial
  helical interface sequence
SMEAK

SEQ ID NO: 13558 - protein, 7 aa, Artificial
  helical interface sequence
EIEQITD

SEQ ID NO: 13559 - protein, 30 aa, Artificial
  helical interface sequence
PDEFRQAFDLAVKGINIIYNLEREALKSKY

SEQ ID NO: 13560 - protein, 7 aa, Artificial
  helical interface sequence
ELEQIAD

SEQ ID NO: 13561 - protein, 15 aa, Artificial
  helical interface sequence
TREGNDLYHEMIESG

SEQ ID NO: 13562 - protein, 7 aa, Artificial
  helical interface sequence
TELFYKG

SEQ ID NO: 13563 - protein, 8 aa, Artificial
  helical interface sequence
QDIIAILG

SEQ ID NO: 13564 - protein, 17 aa, Artificial
  helical interface sequence
HTAWAFLSAIWLWMVLG

SEQ ID NO: 13565 - protein, 14 aa, Artificial
  helical interface sequence
PLIRALAVRTMGCI

SEQ ID NO: 13566 - protein, 20 aa, Artificial
  helical interface sequence
ASPLDQAIGLLIGIFHKYSG

SEQ ID NO: 13567 - protein, 11 aa, Artificial
  helical interface sequence
ETAFQGMLRKL

SEQ ID NO: 13568 - protein, 19 aa, Artificial
  helical interface sequence
GCEERELALALQEALEPAV

SEQ ID NO: 13569 - protein, 11 aa, Artificial
  helical interface sequence
SQVLCGAVKWL

SEQ ID NO: 13570 - protein, 18 aa, Artificial
  helical interface sequence
KRQGALELIKKGYTQQLA

SEQ ID NO: 13571 - protein, 10 aa, Artificial
  helical interface sequence
FTSRTSACGL

SEQ ID NO: 13572 - protein, 11 aa, Artificial
  helical interface sequence
AMDVVYALKRQ

SEQ ID NO: 13573 - protein, 5 aa, Artificial
  helical interface sequence
ESFLF

SEQ ID NO: 13574 - protein, 11 aa, Artificial
  helical interface sequence
AEQAKIAEEAG

SEQ ID NO: 13575 - protein, 13 aa, Artificial
  helical interface sequence
KAEVAAEFLNDRV

SEQ ID NO: 13576 - protein, 9 aa, Artificial
  helical interface sequence
PGRFAKLLL

SEQ ID NO: 13577 - protein, 5 aa, Artificial
  helical interface sequence
PEIVT

SEQ ID NO: 13578 - protein, 7 aa, Artificial
  helical interface sequence
EELNKLL

SEQ ID NO: 13579 - protein, 9 aa, Artificial
  helical interface sequence
LHDQVHLLE

SEQ ID NO: 13580 - protein, 5 aa, Artificial
  helical interface sequence
EKTFG

SEQ ID NO: 13581 - protein, 11 aa, Artificial
  helical interface sequence
YREVQRIRHEF

SEQ ID NO: 13582 - protein, 11 aa, Artificial
  helical interface sequence
YREVQRIRHEF

SEQ ID NO: 13583 - protein, 7 aa, Artificial
  helical interface sequence
KDEYERH

SEQ ID NO: 13584 - protein, 5 aa, Artificial
  helical interface sequence
IVEQC

SEQ ID NO: 13585 - protein, 5 aa, Artificial
  helical interface sequence
IVEQC

SEQ ID NO: 13586 - protein, 7 aa, Artificial
  helical interface sequence
EVLEHVF

SEQ ID NO: 13587 - protein, 13 aa, Artificial
  helical interface sequence
WYIEALAQVFSER

SEQ ID NO: 13588 - protein, 12 aa, Artificial
  helical interface sequence
TLGNLIAGTLRR

SEQ ID NO: 13589 - protein, 8 aa, Artificial
  helical interface sequence
FDCFRMWF

SEQ ID NO: 13590 - protein, 10 aa, Artificial
  helical interface sequence
DEILAHRLAL

SEQ ID NO: 13591 - protein, 6 aa, Artificial
  helical interface sequence
INEVIH

SEQ ID NO: 13592 - protein, 6 aa, Artificial
  helical interface sequence
VLARAA

SEQ ID NO: 13593 - protein, 17 aa, Artificial
  helical interface sequence
IEDLWDLLQYHVATYFD

SEQ ID NO: 13594 - protein, 23 aa, Artificial
  helical interface sequence
LNDQVTLLKYGVHEIIYTMLASL

SEQ ID NO: 13595 - protein, 18 aa, Artificial
  helical interface sequence
PAELIERLEQAWMNEKFA

SEQ ID NO: 13596 - protein, 14 aa, Artificial
  helical interface sequence
KATKKRLAKLDNQN

SEQ ID NO: 13597 - protein, 10 aa, Artificial
  helical interface sequence
GDIVLYQLLR

SEQ ID NO: 13598 - protein, 5 aa, Artificial
  helical interface sequence
PAWQP

SEQ ID NO: 13599 - protein, 9 aa, Artificial
  helical interface sequence
HSIQTWLLG

SEQ ID NO: 13600 - protein, 29 aa, Artificial
  helical interface sequence
RRDFLYYATAGAGAVATGAAVWPLINQMN

SEQ ID NO: 13601 - protein, 5 aa, Artificial
  helical interface sequence
KYELD

SEQ ID NO: 13602 - protein, 12 aa, Artificial
  helical interface sequence
PSVIKGIAQQAV

SEQ ID NO: 13603 - protein, 12 aa, Artificial
  helical interface sequence
EGAVGWFYKYMD

SEQ ID NO: 13604 - protein, 11 aa, Artificial
  helical interface sequence
KEDLDVASRFL

SEQ ID NO: 13605 - protein, 10 aa, Artificial
  helical interface sequence
SLALLQRQFD

SEQ ID NO: 13606 - protein, 13 aa, Artificial
  helical interface sequence
SFEFALAIVEALN

SEQ ID NO: 13607 - protein, 7 aa, Artificial
  helical interface sequence
YRSWGRS

SEQ ID NO: 13608 - protein, 16 aa, Artificial
  helical interface sequence
DRQHKTRTLKETLEGA

SEQ ID NO: 13609 - protein, 11 aa, Artificial
  helical interface sequence
ETAFQGMLRKL

SEQ ID NO: 13610 - protein, 13 aa, Artificial
  helical interface sequence
ANKRLDVVNRITA

SEQ ID NO: 13611 - protein, 13 aa, Artificial
  helical interface sequence
ANKRLDAVNRITA

SEQ ID NO: 13612 - protein, 13 aa, Artificial
  helical interface sequence
ANKRLDAVNRITA

SEQ ID NO: 13613 - protein, 13 aa, Artificial
  helical interface sequence
ANKRLDAVNRITA

SEQ ID NO: 13614 - protein, 13 aa, Artificial
  helical interface sequence
ANKRLDAVNRITA

SEQ ID NO: 13615 - protein, 24 aa, Artificial
  helical interface sequence
LKDAEAVQKFFLEEIQLGEELLAQ

SEQ ID NO: 13616 - protein, 13 aa, Artificial
  helical interface sequence
PLASEIGADVLKK

SEQ ID NO: 13617 - protein, 16 aa, Artificial
  helical interface sequence
SGGIFLLQMPKILDHF

SEQ ID NO: 13618 - protein, 16 aa, Artificial
  helical interface sequence
CPEDLLGVLELSYDEG

SEQ ID NO: 13619 - protein, 14 aa, Artificial
  helical interface sequence
LELKKLVYLYLMNY

SEQ ID NO: 13620 - protein, 12 aa, Artificial
  helical interface sequence
EALVHQVVVAYA

SEQ ID NO: 13621 - protein, 10 aa, Artificial
  helical interface sequence
FTCAKKLKKR

SEQ ID NO: 13622 - protein, 15 aa, Artificial
  helical interface sequence
GRDMEAMAIGLREAM

SEQ ID NO: 13623 - protein, 12 aa, Artificial
  helical interface sequence
GRGAENLLSQLA

SEQ ID NO: 13624 - protein, 61 aa, Artificial
  helical interface sequence
MGREVENLILENTQLLETKNALNIVKNDLIAKVDELTCEKDVLQGELEAVKQAKLKLEEKN

SEQ ID NO: 13625 - protein, 61 aa, Artificial; identical to SEQ ID NO: 13624
  helical interface sequence

SEQ ID NO: 13626 - protein, 17 aa, Artificial
  helical interface sequence
ISTVREVALLRRLEAFE

SEQ ID NO: 13627 - protein, 10 aa, Artificial
  helical interface sequence
VKHVYEFLKA

SEQ ID NO: 13628 - protein, 11 aa, Artificial
  helical interface sequence
DEILAHRLALI

SEQ ID NO: 13629 - protein, 10 aa, Artificial
  helical interface sequence
HTLGNLIAGT

SEQ ID NO: 13630 - protein, 13 aa, Artificial
  helical interface sequence
YAFKLLIQELMSM

SEQ ID NO: 13631 - protein, 11 aa, Artificial
  helical interface sequence
HLVEALYLVCG

SEQ ID NO: 13632 - protein, 7 aa, Artificial
  helical interface sequence
KGVFVLN

SEQ ID NO: 13633 - protein, 17 aa, Artificial
  helical interface sequence
EYQNEKLANELKSLLDE

SEQ ID NO: 13634 - protein, 11 aa, Artificial
  helical interface sequence
ASQAEECAQDV

SEQ ID NO: 13635 - protein, 20 aa, Artificial
  helical interface sequence
ASIHDTVENLIILANNSLSS

SEQ ID NO: 13636 - protein, 12 aa, Artificial
  helical interface sequence
DNYLKEVINQVE

SEQ ID NO: 13637 - protein, 15 aa, Artificial
  helical interface sequence
VVSALQMLKQHLFKY

SEQ ID NO: 13638 - protein, 22 aa, Artificial
  helical interface sequence
IPDARNAALRAKAEAAEFRYKY

SEQ ID NO: 13639 - protein, 15 aa, Artificial
  helical interface sequence
VVSALQMLKQHLFKY

SEQ ID NO: 13640 - protein, 9 aa, Artificial
  helical interface sequence
DEQIFYLRS

SEQ ID NO: 13641 - protein, 12 aa, Artificial
  helical interface sequence
NQFFLQTALNAV

SEQ ID NO: 13642 - protein, 9 aa, Artificial
  helical interface sequence
WFDILDDWL

SEQ ID NO: 13643 - protein, 40 aa, Artificial
  helical interface sequence
EEEQFALALKMSEQEAREVNNQEEKEEELLRKAIAESLNS

SEQ ID NO: 13644 - protein, 5 aa, Artificial
  helical interface sequence
FKDIG

SEQ ID NO: 13645 - protein, 15 aa, Artificial
  helical interface sequence
DKAAEDTIKRLVMRE

SEQ ID NO: 13646 - protein, 14 aa, Artificial
  helical interface sequence
FEETGQELTELLEE

SEQ ID NO: 13647 - protein, 11 aa, Artificial
  helical interface sequence
EHVVDTCRKFI

SEQ ID NO: 13648 - protein, 11 aa, Artificial
  helical interface sequence
VDNASMQAVAK

SEQ ID NO: 13649 - protein, 11 aa, Artificial
  helical interface sequence
EEEKDKWRRKV

SEQ ID NO: 13650 - protein, 6 aa, Artificial
  helical interface sequence
SEQLTS

SEQ ID NO: 13651 - protein, 12 aa, Artificial
  helical interface sequence
EEEIREAFRVFD

SEQ ID NO: 13652 - protein, 26 aa, Artificial
  helical interface sequence
GEAYLSYSLGALSMMGFIATCFVWFN

SEQ ID NO: 13653 - protein, 19 aa, Artificial
  helical interface sequence
FYTKNLLLNEGIRAWMAPQ

SEQ ID NO: 13654 - protein, 11 aa, Artificial
  helical interface sequence
AMDVVYALKRQ

SEQ ID NO: 13655 - protein, 10 aa, Artificial
  helical interface sequence
RPDAEYWNSQ

SEQ ID NO: 13656 - protein, 10 aa, Artificial
  helical interface sequence
RPDAEYWNSQ

SEQ ID NO: 13657 - protein, 5 aa, Artificial
  helical interface sequence
ACLLA

SEQ ID NO: 13658 - protein, 24 aa, Artificial
  helical interface sequence
SQERTARLNELQRALVMMDSDFRQ

SEQ ID NO: 13659 - protein, 6 aa, Artificial
  helical interface sequence
DSEYLA

SEQ ID NO: 13660 - protein, 9 aa, Artificial
  helical interface sequence
PVGPALGQH

SEQ ID NO: 13661 - protein, 12 aa, Artificial
  helical interface sequence
SSVRRGFQVYKQ

SEQ ID NO: 13662 - protein, 11 aa, Artificial
  helical interface sequence
LGEAFKKIDAI

SEQ ID NO: 13663 - protein, 21 aa, Artificial
  helical interface sequence
PHELTESVLPAARYDYAVAEQ

SEQ ID NO: 13664 - protein, 22 aa, Artificial
  helical interface sequence
MGSLLGLCLVIQIVTGIFMAMH

SEQ ID NO: 13665 - protein, 20 aa, Artificial
  helical interface sequence
EDESYARAYRIIRAHQTELT

SEQ ID NO: 13666 - protein, 6 aa, Artificial
  helical interface sequence
SSDFEA

SEQ ID NO: 13667 - protein, 6 aa, Artificial
  helical interface sequence
DAAKNQ

SEQ ID NO: 13668 - protein, 5 aa, Artificial
  helical interface sequence
LGITR

SEQ ID NO: 13669 - protein, 5 aa, Artificial
  helical interface sequence
ERMSG

SEQ ID NO: 13670 - protein, 7 aa, Artificial
  helical interface sequence
LEKWESY

SEQ ID NO: 13671 - protein, 20 aa, Artificial
  helical interface sequence
PENFRLLGDILVIILAAHFG

SEQ ID NO: 13672 - protein, 36 aa, Artificial
  helical interface sequence
MQIVRKVLLPEALPGLVNAATITLITLVGYSAMGGA

SEQ ID NO: 13673 - protein, 19 aa, Artificial
  helical interface sequence
LLPEALPGLVNAATITLIT

SEQ ID NO: 13674 - protein, 33 aa, Artificial; identical to SEQ ID NO: 104
  helical interface sequence

SEQ ID NO: 13675 - protein, 10 aa, Artificial
  helical interface sequence
VEQMHEDIIS

SEQ ID NO: 13676 - protein, 10 aa, Artificial
  helical interface sequence
QIRLWQLELD

SEQ ID NO: 13677 - protein, 8 aa, Artificial
  helical interface sequence
LEEMMTAC

SEQ ID NO: 13678 - protein, 31 aa, Artificial
  helical interface sequence
ATWNFVSSLGAFLSFASFLFFLGVIFYTLTR

SEQ ID NO: 13679 - protein, 14 aa, Artificial
  helical interface sequence
YIQAAGVALGLKMR

SEQ ID NO: 13680 - protein, 13 aa, Artificial
  helical interface sequence
PENRENTAEIMFE

SEQ ID NO: 13681 - protein, 21 aa, Artificial
  helical interface sequence
ASLSEAVQAACMLRYQKCLDA

SEQ ID NO: 13682 - protein, 13 aa, Artificial
  helical interface sequence
PEERHLSKMQQNG

SEQ ID NO: 13683 - protein, 14 aa, Artificial
  helical interface sequence
GPLFNTDYDILKSN

SEQ ID NO: 13684 - protein, 13 aa, Artificial
  helical interface sequence
AHLIKHLQTVQQN

SEQ ID NO: 13685 - protein, 5 aa, Artificial
  helical interface sequence
WAWIV

SEQ ID NO: 13686 - protein, 8 aa, Artificial
  helical interface sequence
IYDICRRN

SEQ ID NO: 13687 - protein, 5 aa, Artificial
  helical interface sequence
KILED

SEQ ID NO: 13688 - protein, 12 aa, Artificial
  helical interface sequence
VKDIIFAIKKTL

SEQ ID NO: 13689 - protein, 6 aa, Artificial
  helical interface sequence
KILEDN

SEQ ID NO: 13690 - protein, 14 aa, Artificial
  helical interface sequence
EMGFAGIAVGAAMA

SEQ ID NO: 13691 - protein, 12 aa, Artificial
  helical interface sequence
APILRQMIDSAG

SEQ ID NO: 13692 - protein, 9 aa, Artificial
  helical interface sequence
SLWFKQIMN

SEQ ID NO: 13693 - protein, 6 aa, Artificial
  helical interface sequence
VERKRE

SEQ ID NO: 13694 - protein, 11 aa, Artificial
  helical interface sequence
QEVKMVAWWIG

SEQ ID NO: 13695 - protein, 11 aa, Artificial
  helical interface sequence
LGLMTEKLSQK

SEQ ID NO: 13696 - protein, 18 aa, Artificial
  helical interface sequence
PYAAQLAALDAAKKAMAY

SEQ ID NO: 13697 - protein, 15 aa, Artificial
  helical interface sequence
TREGNDLYREMKETG

SEQ ID NO: 13698 - protein, 12 aa, Artificial
  helical interface sequence
TREGNDLYREMK

SEQ ID NO: 13699 - protein, 11 aa, Artificial
  helical interface sequence
YHELKVAMKAL

SEQ ID NO: 13700 - protein, 5 aa, Artificial
  helical interface sequence
VQAWI

SEQ ID NO: 13701 - protein, 8 aa, Artificial
  helical interface sequence
HIPELADE

SEQ ID NO: 13702 - protein, 6 aa, Artificial
  helical interface sequence
GVTLLQ

SEQ ID NO: 13703 - protein, 5 aa, Artificial
  helical interface sequence
ERMSG

SEQ ID NO: 13704 - protein, 29 aa, Artificial
  helical interface sequence
PEYWDGETRKVKAHSQTHRVDLGTLRGYY

SEQ ID NO: 13705 - protein, 15 aa, Artificial
  helical interface sequence
PEVKRRIMLGTFALS

SEQ ID NO: 13706 - protein, 7 aa, Artificial
  helical interface sequence
REKALMN

SEQ ID NO: 13707 - protein, 15 aa, Artificial
  helical interface sequence
PEVKRRIMLGTFALS

SEQ ID NO: 13708 - protein, 15 aa, Artificial
  helical interface sequence
PEVKRRIMLGTFALS

SEQ ID NO: 13709 - protein, 44 aa, Artificial; identical to SEQ ID NO: 6508
  helical interface sequence

SEQ ID NO: 13710 - protein, 11 aa, Artificial
  helical interface sequence
TASVNCAKKIV

SEQ ID NO: 13711 - protein, 10 aa, Artificial
  helical interface sequence
KEQKYSFLQN

SEQ ID NO: 13712 - protein, 8 aa, Artificial
  helical interface sequence
EKELLDSY

SEQ ID NO: 13713 - protein, 13 aa, Artificial
  helical interface sequence
YAFKLLIQELMSM

SEQ ID NO: 13714 - protein, 6 aa, Artificial
  helical interface sequence
QSSIDR

SEQ ID NO: 13715 - protein, 7 aa, Artificial
  helical interface sequence
IRGNLMG

SEQ ID NO: 13716 - protein, 9 aa, Artificial
  helical interface sequence
LLDLLREDF

SEQ ID NO: 13717 - protein, 17 aa, Artificial
  helical interface sequence
IKIHAAVRYAVERCANA

SEQ ID NO: 13718 - protein, 12 aa, Artificial
  helical interface sequence
EEELAECFRIFD

SEQ ID NO: 13719 - protein, 5 aa, Artificial
  helical interface sequence
WPILG

SEQ ID NO: 13720 - protein, 15 aa, Artificial
  helical interface sequence
KHLFQGYLNIYNNYF

SEQ ID NO: 13721 - protein, 31 aa, Artificial
  helical interface sequence
AYWNNISSIGAYISFASFLFFIGIVFYTLFA

SEQ ID NO: 13722 - protein, 25 aa, Artificial
  helical interface sequence
TRRYAACIRDLDYYLRYATYAMLAG

SEQ ID NO: 13723 - protein, 14 aa, Artificial
  helical interface sequence
GEKRLRIAQILTDN

SEQ ID NO: 13724 - protein, 5 aa, Artificial
  helical interface sequence
RNEAQ

SEQ ID NO: 13725 - protein, 9 aa, Artificial
  helical interface sequence
GPVDEWGIA

SEQ ID NO: 13726 - protein, 33 aa, Artificial
  helical interface sequence
KIAAIKEEQAAIEEEIQAIKEEIAAIKYLIAQI

SEQ ID NO: 13727 - protein, 6 aa, Artificial
  helical interface sequence
LLEIAQ

SEQ ID NO: 13728 - protein, 35 aa, Artificial; identical to SEQ ID NO: 5344
  helical interface sequence

SEQ ID NO: 13729 - protein, 10 aa, Artificial
  helical interface sequence
AEVLKQAQQE

SEQ ID NO: 13730 - protein, 9 aa, Artificial
  helical interface sequence
FEDYVEGLR

SEQ ID NO: 13731 - protein, 6 aa, Artificial
  helical interface sequence
VQAWIR

SEQ ID NO: 13732 - protein, 10 aa, Artificial
  helical interface sequence
DIFREIASSM

SEQ ID NO: 13733 - protein, 15 aa, Artificial
  helical interface sequence
VSELAELVKKLEDKF

SEQ ID NO: 13734 - protein, 15 aa, Artificial
  helical interface sequence
STNVLGEAKKLNESQ

SEQ ID NO: 13735 - protein, 13 aa, Artificial
  helical interface sequence
QDQRIGLSVIQRN

SEQ ID NO: 13736 - protein, 12 aa, Artificial
  helical interface sequence
VVFTDEMAHFDR

SEQ ID NO: 13737 - protein, 8 aa, Artificial
  helical interface sequence
GEEVEELL

SEQ ID NO: 13738 - protein, 15 aa, Artificial
  helical interface sequence
DKTRANLKKLKTLMS

SEQ ID NO: 13739 - protein, 15 aa, Artificial
  helical interface sequence
DKTRANLKKLKTLMS

SEQ ID NO: 13740 - protein, 15 aa, Artificial
  helical interface sequence
DKTRANLKKLKTLMS

SEQ ID NO: 13741 - protein, 6 aa, Artificial
  helical interface sequence
MMELAE

SEQ ID NO: 13742 - protein, 11 aa, Artificial
  helical interface sequence
MMDCKKALTEA

SEQ ID NO: 13743 - protein, 11 aa, Artificial
  helical interface sequence
VGRVHRLLRKG

SEQ ID NO: 13744 - protein, 11 aa, Artificial
  helical interface sequence
AMDVVYALKRQ

SEQ ID NO: 13745 - protein, 7 aa, Artificial
  helical interface sequence
EIDQITH

SEQ ID NO: 13746 - protein, 22 aa, Artificial
  helical interface sequence
PQGGLQNIAAEKHNLGILTKRS

SEQ ID NO: 13747 - protein, 12 aa, Artificial
  helical interface sequence
AIYVYKVLKQVH

SEQ ID NO: 13748 - protein, 6 aa, Artificial
  helical interface sequence
SEQLTS

SEQ ID NO: 13749 - protein, 13 aa, Artificial
  helical interface sequence
VGELFWKVKEEEG

SEQ ID NO: 13750 - protein, 12 aa, Artificial
  helical interface sequence
QTFAYGVLDSNY

SEQ ID NO: 13751 - protein, 14 aa, Artificial
  helical interface sequence
AADGDALVKRFKNS

SEQ ID NO: 13752 - protein, 10 aa, Artificial
  helical interface sequence
QVEYALESIS

SEQ ID NO: 13753 - protein, 14 aa, Artificial
  helical interface sequence
YSGFYTFSLLDHHY

SEQ ID NO: 13754 - protein, 14 aa, Artificial
  helical interface sequence
YTVWHFRRVLLRSL

SEQ ID NO: 13755 - protein, 10 aa, Artificial
  helical interface sequence
DELLLGIFSC

SEQ ID NO: 13756 - protein, 23 aa, Artificial
  helical interface sequence
PREKDKLLLFTAALVAERRLARG

SEQ ID NO: 13757 - protein, 16 aa, Artificial
  helical interface sequence
TKLLVSEVAKIMQEAT

SEQ ID NO: 13758 - protein, 22 aa, Artificial
  helical interface sequence
APDARVLSNYLRQQCNYSSLVF

SEQ ID NO: 13759 - protein, 15 aa, Artificial
  helical interface sequence
PETFTQLVSSSLYER

SEQ ID NO: 13760 - protein, 12 aa, Artificial
  helical interface sequence
SDQLFGMCESLY

SEQ ID NO: 13761 - protein, 15 aa, Artificial
  helical interface sequence
VAAASKILSNLVYQY

SEQ ID NO: 13762 - protein, 6 aa, Artificial
  helical interface sequence
CMAEVI

SEQ ID NO: 13763 - protein, 16 aa, Artificial
  helical interface sequence
AGRGVITAINFLEEEG

SEQ ID NO: 13764 - protein, 6 aa, Artificial
  helical interface sequence
CMAEVI

SEQ ID NO: 13765 - protein, 15 aa, Artificial
  helical interface sequence
AGRGVITAINFLEEE

SEQ ID NO: 13766 - protein, 18 aa, Artificial
  helical interface sequence
TADAFTLFELFERKLEMH

SEQ ID NO: 13767 - protein, 14 aa, Artificial
  helical interface sequence
SNKRLDVVNRITSN

SEQ ID NO: 13768 - protein, 18 aa, Artificial
  helical interface sequence
DAAVEANSYLDYAINALS

SEQ ID NO: 13769 - protein, 14 aa, Artificial
  helical interface sequence
SNKRLDVVNRITSN

SEQ ID NO: 13770 - protein, 12 aa, Artificial
  helical interface sequence
PLTEAVSVADSQ

SEQ ID NO: 13771 - protein, 12 aa, Artificial
  helical interface sequence
WEQWWNAFNEEN

SEQ ID NO: 13772 - protein, 6 aa, Artificial
  helical interface sequence
KTNILQ

SEQ ID NO: 13773 - protein, 11 aa, Artificial
  helical interface sequence
EKTAVKIADIL

SEQ ID NO: 13774 - protein, 13 aa, Artificial
  helical interface sequence
MNLYRGVKRASEN

SEQ ID NO: 13775 - protein, 5 aa, Artificial
  helical interface sequence
HTWLH

SEQ ID NO: 13776 - protein, 7 aa, Artificial
  helical interface sequence
CMAEVIG

SEQ ID NO: 13777 - protein, 5 aa, Artificial
  helical interface sequence
YDALT

SEQ ID NO: 13778 - protein, 13 aa, Artificial
  helical interface sequence
VKDVQLHLERQWN

SEQ ID NO: 13779 - protein, 9 aa, Artificial
  helical interface sequence
MVTLENLLF

SEQ ID NO: 13780 - protein, 9 aa, Artificial
  helical interface sequence
MVTLENLLF

SEQ ID NO: 13781 - protein, 19 aa, Artificial
  helical interface sequence
KKAEAVATVVAAVDQARVR

SEQ ID NO: 13782 - protein, 19 aa, Artificial
  helical interface sequence
PDNFKLLSDCITIVLAAKM

SEQ ID NO: 13783 - protein, 19 aa, Artificial
  helical interface sequence
SAAPLVTATAFVQAIINEF

SEQ ID NO: 13784 - protein, 6 aa, Artificial
  helical interface sequence
HRDWLN

SEQ ID NO: 13785 - protein, 5 aa, Artificial
  helical interface sequence
EEFAK

SEQ ID NO: 13786 - protein, 9 aa, Artificial
  helical interface sequence
RPDAENWNS

SEQ ID NO: 13787 - protein, 13 aa, Artificial
  helical interface sequence
QVARVAAGLQIKN

SEQ ID NO: 13788 - protein, 9 aa, Artificial
  helical interface sequence
PDKDMEIME

SEQ ID NO: 13789 - protein, 16 aa, Artificial
  helical interface sequence
ELAKHAVSEGTRAVTK

SEQ ID NO: 13790 - protein, 14 aa, Artificial
  helical interface sequence
DEQIAAQVDYIVAN

SEQ ID NO: 13791 - protein, 14 aa, Artificial
  helical interface sequence
AKNYGRAVYECLRG

SEQ ID NO: 13792 - protein, 14 aa, Artificial
  helical interface sequence
AKNYGRAVYECLRG

SEQ ID NO: 13793 - protein, 22 aa, Artificial
  helical interface sequence
YADFQYLKQVLGQMVIDEELLG

SEQ ID NO: 13794 - protein, 15 aa, Artificial
  helical interface sequence
VVTANRMLKQMLFRY

SEQ ID NO: 13795 - protein, 14 aa, Artificial
  helical interface sequence
LFETISQAMLNAVD

SEQ ID NO: 13796 - protein, 15 aa, Artificial
  helical interface sequence
VVTANRMLKQMLFRY

SEQ ID NO: 13797 - protein, 9 aa, Artificial
  helical interface sequence
VILERERLD

SEQ ID NO: 13798 - protein, 8 aa, Artificial
  helical interface sequence
FLGAIAAM

SEQ ID NO: 13799 - protein, 18 aa, Artificial
  helical interface sequence
CDVLAKRMANLSQIYTQR

SEQ ID NO: 13800 - protein, 15 aa, Artificial
  helical interface sequence
TETAASVFKELCYEN

SEQ ID NO: 13801 - protein, 14 aa, Artificial
  helical interface sequence
FGAHMANPLLRKVV

SEQ ID NO: 13802 - protein, 16 aa, Artificial
  helical interface sequence
ADEVGGEALGRLLVVY

SEQ ID NO: 13803 - protein, 12 aa, Artificial
  helical interface sequence
PLSIALAMGMME

SEQ ID NO: 13804 - protein, 12 aa, Artificial
  helical interface sequence
PLSIALAMGMME

SEQ ID NO: 13805 - protein, 15 aa, Artificial
  helical interface sequence
PEDWKHLVNFHLGQF

SEQ ID NO: 13806 - protein, 15 aa, Artificial
  helical interface sequence
AHSRAALDRLEKLLR

SEQ ID NO: 13807 - protein, 7 aa, Artificial
  helical interface sequence
AVAASAL

SEQ ID NO: 13808 - protein, 7 aa, Artificial
  helical interface sequence
PESLNAS

SEQ ID NO: 13809 - protein, 12 aa, Artificial
  helical interface sequence
LEDYVRYVTLDM

SEQ ID NO: 13810 - protein, 5 aa, Artificial
  helical interface sequence
PRTFG

SEQ ID NO: 13811 - protein, 5 aa, Artificial
  helical interface sequence
AHCLL

SEQ ID NO: 13812 - protein, 16 aa, Artificial
  helical interface sequence
VKFLAITTDCLQILAY

SEQ ID NO: 13813 - protein, 18 aa, Artificial
  helical interface sequence
AHAGEYGAEALERMFLSF

SEQ ID NO: 13814 - protein, 10 aa, Artificial
  helical interface sequence
WVDWWQWWVK

SEQ ID NO: 13815 - protein, 10 aa, Artificial
  helical interface sequence
KILHRLLQEG

SEQ ID NO: 13816 - protein, 16 aa, Artificial
  helical interface sequence
WAKIRDEMGLAMEEGC

SEQ ID NO: 13817 - protein, 16 aa, Artificial
  helical interface sequence
WAKIRDEMGLAMEEGC

SEQ ID NO: 13818 - protein, 39 aa, Artificial; identical to SEQ ID NO: 1499
  helical interface sequence

SEQ ID NO: 13819 - protein, 62 aa, Artificial; identical to SEQ ID NO: 519
  helical interface sequence

SEQ ID NO: 13820 - protein, 25 aa, Artificial
  helical interface sequence
EEMTATCLRDLDYYLRLVTYGIVSG

SEQ ID NO: 13821 - protein, 13 aa, Artificial
  helical interface sequence
PVGFRWAMEAKNN

SEQ ID NO: 13822 - protein, 6 aa, Artificial
  helical interface sequence
ACVKTC

SEQ ID NO: 13823 - protein, 11 aa, Artificial
  helical interface sequence
AMDVVYALKRQ

SEQ ID NO: 13824 - protein, 12 aa, Artificial
  helical interface sequence
SREIQTAVRLLL

SEQ ID NO: 13825 - protein, 21 aa, Artificial
  helical interface sequence
PHELTESVLPAARYDYAVAEQ

SEQ ID NO: 13826 - protein, 10 aa, Artificial
  helical interface sequence
PIMQTALRRL

SEQ ID NO: 13827 - protein, 16 aa, Artificial
  helical interface sequence
AHCASSRQIISHWKNC

SEQ ID NO: 13828 - protein, 14 aa, Artificial
  helical interface sequence
PVSISMSLAMLSLG

SEQ ID NO: 13829 - protein, 46 aa, Artificial; identical to SEQ ID NO: 1500
  helical interface sequence

SEQ ID NO: 13830 - protein, 9 aa, Artificial
  helical interface sequence
QAAYLLRKH

SEQ ID NO: 13831 - protein, 13 aa, Artificial
  helical interface sequence
GCELQTTLLKQEK

SEQ ID NO: 13832 - protein, 19 aa, Artificial
  helical interface sequence
IEQLTQKSKKIIEEIIRYE

SEQ ID NO: 13833 - protein, 12 aa, Artificial
  helical interface sequence
DAWSSRILLEEM

SEQ ID NO: 13834 - protein, 9 aa, Artificial
  helical interface sequence
YKKFIEDVL

SEQ ID NO: 13835 - protein, 20 aa, Artificial
  helical interface sequence
QAQETQGQAAARAAAADLAA

SEQ ID NO: 13836 - protein, 12 aa, Artificial
  helical interface sequence
SVWIGGSILASL

SEQ ID NO: 13837 - protein, 8 aa, Artificial
  helical interface sequence
EQLVIEFY

SEQ ID NO: 13838 - protein, 16 aa, Artificial
  helical interface sequence
EKFRDVYDYFRAVLQR

SEQ ID NO: 13839 - protein, 16 aa, Artificial
  helical interface sequence
PKPKFVREVLEKCMRL

SEQ ID NO: 13840 - protein, 32 aa, Artificial; identical to SEQ ID NO: 2819
  helical interface sequence

SEQ ID NO: 13841 - protein, 15 aa, Artificial
  helical interface sequence
IQKLESDVSAQMEYC

SEQ ID NO: 13842 - protein, 6 aa, Artificial
  helical interface sequence
SEQLTS

SEQ ID NO: 13843 - protein, 6 aa, Artificial
  helical interface sequence
PSFWWN

SEQ ID NO: 13844 - protein, 9 aa, Artificial
  helical interface sequence
FEISLKIFN

SEQ ID NO: 13845 - protein, 6 aa, Artificial
  helical interface sequence
PEELRT

SEQ ID NO: 13846 - protein, 11 aa, Artificial
  helical interface sequence
VEGISKLLREH

SEQ ID NO: 13847 - protein, 7 aa, Artificial
  helical interface sequence
EILEHIC

SEQ ID NO: 13848 - protein, 43 aa, Artificial; identical to SEQ ID NO: 26
  helical interface sequence

SEQ ID NO: 13849 - protein, 9 aa, Artificial
  helical interface sequence
EIKNMWAAF

SEQ ID NO: 13850 - protein, 16 aa, Artificial
  helical interface sequence
AIVVGRILTEVIKKEA

SEQ ID NO: 13851 - protein, 15 aa, Artificial
  helical interface sequence
PDVFEASVSALIAAH

SEQ ID NO: 13852 - protein, 34 aa, Artificial; identical to SEQ ID NO: 7153
  helical interface sequence

SEQ ID NO: 13853 - protein, 10 aa, Artificial
  helical interface sequence
ARTWRFLTFG

SEQ ID NO: 13854 - protein, 28 aa, Artificial
  helical interface sequence
DTWAKIHFAIMFVGVNMTFFPQHFLGLS

SEQ ID NO: 13855 - protein, 13 aa, Artificial
  helical interface sequence
LFQFGEMILQKTG

SEQ ID NO: 13856 - protein, 15 aa, Artificial
  helical interface sequence
VPDVVQEAFIKAYRA

SEQ ID NO: 13857 - protein, 10 aa, Artificial
  helical interface sequence
DHIAENILSY

SEQ ID NO: 13858 - protein, 10 aa, Artificial
  helical interface sequence
VQSVQANIAQ

SEQ ID NO: 13859 - protein, 5 aa, Artificial
  helical interface sequence
PRLSH

SEQ ID NO: 13860 - protein, 8 aa, Artificial
  helical interface sequence
IEELGEIL

SEQ ID NO: 13861 - protein, 18 aa, Artificial
  helical interface sequence
LSDAYATFALMMSISDSL

SEQ ID NO: 13862 - protein, 8 aa, Artificial
  helical interface sequence
STLLGWFG

SEQ ID NO: 13863 - protein, 10 aa, Artificial
  helical interface sequence
ILAGALATYQ

SEQ ID NO: 13864 - protein, 6 aa, Artificial
  helical interface sequence
SADWYN

SEQ ID NO: 13865 - protein, 5 aa, Artificial
  helical interface sequence
SEELQ

SEQ ID NO: 13866 - protein, 23 aa, Artificial
  helical interface sequence
AGIAIELVRLFAVELEHYEKIEG

SEQ ID NO: 13867 - protein, 13 aa, Artificial
  helical interface sequence
WYFYPVFQILRVV

SEQ ID NO: 13868 - protein, 5 aa, Artificial
  helical interface sequence
SEQLT

SEQ ID NO: 13869 - protein, 12 aa, Artificial
  helical interface sequence
ESDAAKKLQEFI

SEQ ID NO: 13870 - protein, 21 aa, Artificial
  helical interface sequence
RQEVEVLREKMFLCLDEYCRR

SEQ ID NO: 13871 - protein, 7 aa, Artificial
  helical interface sequence
EADAKDL

SEQ ID NO: 13872 - protein, 14 aa, Artificial
  helical interface sequence
TEFEYLRKVLFEYM

SEQ ID NO: 13873 - protein, 9 aa, Artificial
  helical interface sequence
RPDAENWNS

SEQ ID NO: 13874 - protein, 23 aa, Artificial
  helical interface sequence
QKSTQNAIDGITNKVNSVIEKMN

SEQ ID NO: 13875 - protein, 16 aa, Artificial
  helical interface sequence
VKIIKSVETAAAARLC

SEQ ID NO: 13876 - protein, 10 aa, Artificial
  helical interface sequence
LLDYLRETVG

SEQ ID NO: 13877 - protein, 8 aa, Artificial
  helical interface sequence
AKEVAKIL

SEQ ID NO: 13878 - protein, 8 aa, Artificial
  helical interface sequence
AKEVAKIL

SEQ ID NO: 13879 - protein, 7 aa, Artificial
  helical interface sequence
KVKSQLK

SEQ ID NO: 13880 - protein, 23 aa, Artificial
  helical interface sequence
AGDTVQFAEYIQANIQLYSIRED

SEQ ID NO: 13881 - protein, 5 aa, Artificial
  helical interface sequence
DEQLK

SEQ ID NO: 13882 - protein, 7 aa, Artificial
  helical interface sequence
AKQKRNE

SEQ ID NO: 13883 - protein, 26 aa, Artificial
  helical interface sequence
YARGHYTIGKEIIDLVLDRIRKLADQ

SEQ ID NO: 13884 - protein, 15 aa, Artificial
  helical interface sequence
VKIIKSVETAAAARL

SEQ ID NO: 13885 - protein, 15 aa, Artificial
  helical interface sequence
TPGMIMASEALLRKN

SEQ ID NO: 13886 - protein, 16 aa, Artificial
  helical interface sequence
MEGTGLMLMANLFKTS

SEQ ID NO: 13887 - protein, 15 aa, Artificial
  helical interface sequence
ADQKDLLRMSWGVLS

SEQ ID NO: 13888 - protein, 8 aa, Artificial
  helical interface sequence
YAQALQSV

SEQ ID NO: 13889 - protein, 24 aa, Artificial
  helical interface sequence
QWLYSARGDFFRATSRLTTDFGNA

SEQ ID NO: 13890 - protein, 15 aa, Artificial
  helical interface sequence
YLQLASMLAKIHKLN

SEQ ID NO: 13891 - protein, 15 aa, Artificial
  helical interface sequence
WGTAHYTLNKVRSAK

SEQ ID NO: 13892 - protein, 6 aa, Artificial
  helical interface sequence
SEQLTS

SEQ ID NO: 13893 - protein, 5 aa, Artificial
  helical interface sequence
YALCS

SEQ ID NO: 13894 - protein, 8 aa, Artificial
  helical interface sequence
EQFALQAL

SEQ ID NO: 13895 - protein, 8 aa, Artificial
  helical interface sequence
PAVKRLFD

SEQ ID NO: 13896 - protein, 14 aa, Artificial
  helical interface sequence
TEVKQKLQEFLLSK

SEQ ID NO: 13897 - protein, 10 aa, Artificial
  helical interface sequence
VNTGQISIRH

SEQ ID NO: 13898 - protein, 26 aa, Artificial
  helical interface sequence
ALKKRVQALKARNYALKQKVQALRHK

SEQ ID NO: 13899 - protein, 11 aa, Artificial
  helical interface sequence
AMDVVYALKRQ

SEQ ID NO: 13900 - protein, 24 aa, Artificial
  helical interface sequence
PEQLFAAGYAACFQGALGVVSRRQ

SEQ ID NO: 13901 - protein, 24 aa, Artificial
  helical interface sequence
FLDQQAQERSMDKCLGWFLEPVVR

SEQ ID NO: 13902 - protein, 11 aa, Artificial
  helical interface sequence
LKYFEKWSASM

SEQ ID NO: 13903 - protein, 11 aa, Artificial
  helical interface sequence
LKYFEKWSASM

SEQ ID NO: 13904 - protein, 8 aa, Artificial
  helical interface sequence
PIQGFSAK

SEQ ID NO: 13905 - protein, 20 aa, Artificial
  helical interface sequence
VFPVVIMGTFACIVALSVLD

SEQ ID NO: 13906 - protein, 28 aa, Artificial
  helical interface sequence
GWLIRSIHRWSASMMVLMMILHVFRVYL

SEQ ID NO: 13907 - protein, 7 aa, Artificial
  helical interface sequence
LERFETG

SEQ ID NO: 13908 - protein, 5 aa, Artificial
  helical interface sequence
ELREK

SEQ ID NO: 13909 - protein, 14 aa, Artificial
  helical interface sequence
DNGAKYLIDVLQKD

SEQ ID NO: 13910 - protein, 16 aa, Artificial
  helical interface sequence
YTKNLLLNEGIRAWMA

SEQ ID NO: 13911 - protein, 19 aa, Artificial
  helical interface sequence
LFPCAYLALGGWLTGTTFV

SEQ ID NO: 13912 - protein, 6 aa, Artificial
  helical interface sequence
LAYDVF

SEQ ID NO: 13913 - protein, 14 aa, Artificial
  helical interface sequence
YLALGGWLTGTTFV

SEQ ID NO: 13914 - protein, 12 aa, Artificial
  helical interface sequence
MKQYLKTKLLEE

SEQ ID NO: 13915 - protein, 12 aa, Artificial
  helical interface sequence
DEDVDEIIKLTD

SEQ ID NO: 13916 - protein, 11 aa, Artificial
  helical interface sequence
YEDFVKKVMAG

SEQ ID NO: 13917 - protein, 9 aa, Artificial
  helical interface sequence
FLDVYQRSA

SEQ ID NO: 13918 - protein, 12 aa, Artificial
  helical interface sequence
LEEVNNNVRLLS

SEQ ID NO: 13919 - protein, 13 aa, Artificial
  helical interface sequence
PRAAARAAVDELQ

SEQ ID NO: 13920 - protein, 5 aa, Artificial
  helical interface sequence
QYIRR

SEQ ID NO: 13921 - protein, 23 aa, Artificial
  helical interface sequence
EKKRKISIFRGIQAYNEIENVLK

SEQ ID NO: 13922 - protein, 23 aa, Artificial
  helical interface sequence
EKKRKISIFRGIQAYNEIENVLK

SEQ ID NO: 13923 - protein, 24 aa, Artificial
  helical interface sequence
QEKKRKISIFRGIQAYNEIENVLK

SEQ ID NO: 13924 - protein, 8 aa, Artificial
  helical interface sequence
IADMAEEV

SEQ ID NO: 13925 - protein, 9 aa, Artificial
  helical interface sequence
IYAIWSDLQ

SEQ ID NO: 13926 - protein, 23 aa, Artificial
  helical interface sequence
PVTNICQAADKQLFTLVEWAKRI

SEQ ID NO: 13927 - protein, 23 aa, Artificial
  helical interface sequence
PVTNICQAADKQLFTLVEWAKRI

SEQ ID NO: 13928 - protein, 25 aa, Artificial
  helical interface sequence
VLPLLTHFADINTFMVQQIIKFTKD

SEQ ID NO: 13929 - protein, 6 aa, Artificial
  helical interface sequence
ELALMY

SEQ ID NO: 13930 - protein, 18 aa, Artificial
  helical interface sequence
PYAAQLAALDAAKKAMAY

SEQ ID NO: 13931 - protein, 11 aa, Artificial
  helical interface sequence
RICLRELAHKG

SEQ ID NO: 13932 - protein, 16 aa, Artificial
  helical interface sequence
AEEIGSDALSRMLAVY

SEQ ID NO: 13933 - protein, 15 aa, Artificial
  helical interface sequence
YEFLREVSYYFTKII

SEQ ID NO: 13934 - protein, 15 aa, Artificial
  helical interface sequence
QSQEDISLLLQLVQN

SEQ ID NO: 13935 - protein, 9 aa, Artificial
  helical interface sequence
DTFWDYVSL

SEQ ID NO: 13936 - protein, 18 aa, Artificial
  helical interface sequence
QATLDADLAHLKSQHDPR

SEQ ID NO: 13937 - protein, 20 aa, Artificial
  helical interface sequence
PAFRAHATRVLGGLDMCIAL

SEQ ID NO: 13938 - protein, 23 aa, Artificial
  helical interface sequence
PAFRAHATRVLGGLDMCIALLDD

SEQ ID NO: 13939 - protein, 5 aa, Artificial
  helical interface sequence
VHIGL

SEQ ID NO: 13940 - protein, 26 aa, Artificial
  helical interface sequence
YLAKADQKRGKKQTARETKKKVLAER

SEQ ID NO: 13941 - protein, 10 aa, Artificial
  helical interface sequence
KSCLLHQFIE

SEQ ID NO: 13942 - protein, 19 aa, Artificial
  helical interface sequence
PDSLENIPEKWTPEVKHFC

SEQ ID NO: 13943 - protein, 9 aa, Artificial
  helical interface sequence
FETAVKKLN

SEQ ID NO: 13944 - protein, 16 aa, Artificial
  helical interface sequence
LSLALYVFDEYLQKTV

SEQ ID NO: 13945 - protein, 6 aa, Artificial
  helical interface sequence
KSSFKF

SEQ ID NO: 13946 - protein, 22 aa, Artificial
  helical interface sequence
AADGDALVKRFKNSVKWYHFDH

SEQ ID NO: 13947 - protein, 10 aa, Artificial
  helical interface sequence
QVEYALESIS

SEQ ID NO: 13948 - protein, 15 aa, Artificial
  helical interface sequence
VAAASKILSNLVYQY

SEQ ID NO: 13949 - protein, 18 aa, Artificial
  helical interface sequence
PVNFKLLSHCLLVTLAAH

SEQ ID NO: 13950 - protein, 13 aa, Artificial
  helical interface sequence
PAVHASLDKFLAS

SEQ ID NO: 13951 - protein, 10 aa, Artificial
  helical interface sequence
IDEIIEAIEK

SEQ ID NO: 13952 - protein, 11 aa, Artificial
  helical interface sequence
AMDVVYALKRQ

SEQ ID NO: 13953 - protein, 11 aa, Artificial
  helical interface sequence
AMDVVYALKRQ

SEQ ID NO: 13954 - protein, 10 aa, Artificial
  helical interface sequence
VGRVHRLLRK

SEQ ID NO: 13955 - protein, 10 aa, Artificial
  helical interface sequence
VGRVHRLLRK

SEQ ID NO: 13956 - protein, 19 aa, Artificial
  helical interface sequence
ELAKHAVSEGTKAVTKYTS

SEQ ID NO: 13957 - protein, 15 aa, Artificial
  helical interface sequence
DVLDVLLEHFVKITE

SEQ ID NO: 13958 - protein, 46 aa, Artificial; identical to SEQ ID NO: 12547
  helical interface sequence

SEQ ID NO: 13959 - protein, 7 aa, Artificial
  helical interface sequence
IAELAAL

SEQ ID NO: 13960 - protein, 16 aa, Artificial
  helical interface sequence
AMLVEIISDQLPKVES

SEQ ID NO: 13961 - protein, 6 aa, Artificial
  helical interface sequence
EKDIVF

SEQ ID NO: 13962 - protein, 11 aa, Artificial
  helical interface sequence
LWHLRSLVFTD

SEQ ID NO: 13963 - protein, 8 aa, Artificial
  helical interface sequence
LWHLRSLV

SEQ ID NO: 13964 - protein, 11 aa, Artificial
  helical interface sequence
VAEQRRAYLEG

SEQ ID NO: 13965 - protein, 11 aa, Artificial
  helical interface sequence
VAEQRRAYLEG

SEQ ID NO: 13966 - protein, 5 aa, Artificial
  helical interface sequence
PRTFG

SEQ ID NO: 13967 - protein, 12 aa, Artificial
  helical interface sequence
EETRAELSQLCA

SEQ ID NO: 13968 - protein, 35 aa, Artificial; identical to SEQ ID NO: 716
  helical interface sequence

SEQ ID NO: 13969 - protein, 21 aa, Artificial
  helical interface sequence
EKLFDELLDVSINCARKLREK

SEQ ID NO: 13970 - protein, 15 aa, Artificial
  helical interface sequence
EEQIAEFKEAFSLFD

SEQ ID NO: 13971 - protein, 14 aa, Artificial
  helical interface sequence
EEMEDRLQALEKDK

SEQ ID NO: 13972 - protein, 6 aa, Artificial
  helical interface sequence
SEQLTS

SEQ ID NO: 13973 - protein, 11 aa, Artificial
  helical interface sequence
PEVAQEVFELD

SEQ ID NO: 13974 - protein, 8 aa, Artificial
  helical interface sequence
LSEINRSF

SEQ ID NO: 13975 - protein, 14 aa, Artificial
  helical interface sequence
GNKRLDIVNRINSN

SEQ ID NO: 13976 - protein, 15 aa, Artificial
  helical interface sequence
DEELQQILDDIQTKR

SEQ ID NO: 13977 - protein, 25 aa, Artificial
  helical interface sequence
PEGKAKCVRDIDHYLRTISYCCVVG

SEQ ID NO: 13978 - protein, 12 aa, Artificial
  helical interface sequence
VFELKRIVEGIL

SEQ ID NO: 13979 - protein, 21 aa, Artificial
  helical interface sequence
KAVANSLKSWNETLTSRLATL

SEQ ID NO: 13980 - protein, 14 aa, Artificial
  helical interface sequence
QNGLEQAKKFHEAV

SEQ ID NO: 13981 - protein, 9 aa, Artificial
  helical interface sequence
ARLQEAIGR

SEQ ID NO: 13982 - protein, 17 aa, Artificial
  helical interface sequence
QEEEELQLALALSQSEA

SEQ ID NO: 13983 - protein, 8 aa, Artificial
  helical interface sequence
HTLFRAYT

SEQ ID NO: 13984 - protein, 8 aa, Artificial
  helical interface sequence
HTLFRAYT

SEQ ID NO: 13985 - protein, 7 aa, Artificial
  helical interface sequence
EAELQDM

SEQ ID NO: 13986 - protein, 7 aa, Artificial
  helical interface sequence
EAELQDM

SEQ ID NO: 13987 - protein, 16 aa, Artificial
  helical interface sequence
LTELLQGYTVEVLRQQ

SEQ ID NO: 13988 - protein, 7 aa, Artificial
  helical interface sequence
TNCYIYN

SEQ ID NO: 13989 - protein, 16 aa, Artificial
  helical interface sequence
DFEILEMAVRELAIEK

SEQ ID NO: 13990 - protein, 16 aa, Artificial
  helical interface sequence
DFEILEMAVRELAIEK

SEQ ID NO: 13991 - protein, 8 aa, Artificial
  helical interface sequence
HTLFRAYT

SEQ ID NO: 13992 - protein, 19 aa, Artificial
  helical interface sequence
EEELDSAGDGLEKYVMTKL

SEQ ID NO: 13993 - protein, 15 aa, Artificial
  helical interface sequence
ALYEQNQSDVNEAKS

SEQ ID NO: 13994 - protein, 8 aa, Artificial
  helical interface sequence
RIGLTLIQ

SEQ ID NO: 13995 - protein, 8 aa, Artificial
  helical interface sequence
MEDLKDMF

SEQ ID NO: 13996 - protein, 8 aa, Artificial
  helical interface sequence
FTAFLTLF

SEQ ID NO: 13997 - protein, 8 aa, Artificial
  helical interface sequence
EEYFRKAI

SEQ ID NO: 13998 - protein, 6 aa, Artificial
  helical interface sequence
CEDIAR

SEQ ID NO: 13999 - protein, 8 aa, Artificial
  helical interface sequence
TQHVREQS

SEQ ID NO: 14000 - protein, 23 aa, Artificial
  helical interface sequence
AAVAVEFARLYAVELEHYEKLEG

SEQ ID NO: 14001 - protein, 12 aa, Artificial
  helical interface sequence
SREIQTAVRLLL

SEQ ID NO: 14002 - protein, 22 aa, Artificial
  helical interface sequence
GEKFSTALNGFYNYLEVFSRSL

SEQ ID NO: 14003 - protein, 31 aa, Artificial; identical to SEQ ID NO: 4418
  helical interface sequence

SEQ ID NO: 14004 - protein, 17 aa, Artificial
  helical interface sequence
RRAADRLEQAIKEARAR

SEQ ID NO: 14005 - protein, 10 aa, Artificial
  helical interface sequence
YLQNITYTPR

SEQ ID NO: 14006 - protein, 17 aa, Artificial
  helical interface sequence
RRAADRLEQAIKEARAR

SEQ ID NO: 14007 - protein, 5 aa, Artificial
  helical interface sequence
PAEFR

SEQ ID NO: 14008 - protein, 5 aa, Artificial
  helical interface sequence
RDFLY

SEQ ID NO: 14009 - protein, 11 aa, Artificial
  helical interface sequence
IGHSIQTWLLG

SEQ ID NO: 14010 - protein, 5 aa, Artificial
  helical interface sequence
RDFLY

SEQ ID NO: 14011 - protein, 20 aa, Artificial
  helical interface sequence
QAQETQGQAAARAAAADLAA

SEQ ID NO: 14012 - protein, 13 aa, Artificial
  helical interface sequence
QRFLTQALHYNTG

SEQ ID NO: 14013 - protein, 11 aa, Artificial
  helical interface sequence
QRFLTQALHYN

SEQ ID NO: 14014 - protein, 12 aa, Artificial
  helical interface sequence
QRFLTQALHYNT

SEQ ID NO: 14015 - protein, 18 aa, Artificial
  helical interface sequence
MDDAYDRLTRHRCRMVER

SEQ ID NO: 14016 - protein, 8 aa, Artificial
  helical interface sequence
HRCRMVER

SEQ ID NO: 14017 - protein, 18 aa, Artificial
  helical interface sequence
PKRIRKAGSLRHRVEELE

SEQ ID NO: 14018 - protein, 23 aa, Artificial
  helical interface sequence
FYLQSKVYRAAERLKWELAQREK

SEQ ID NO: 14019 - protein, 11 aa, Artificial
  helical interface sequence
ATDRCCFVHDC

SEQ ID NO: 14020 - protein, 10 aa, Artificial
  helical interface sequence
HADYVKNMIT

SEQ ID NO: 14021 - protein, 29 aa, Artificial
  helical interface sequence
KARETLFAAGNYAYAHRKRRKRDFRRLWI

SEQ ID NO: 14022 - protein, 7 aa, Artificial
  helical interface sequence
LRSAMRL

SEQ ID NO: 14023 - protein, 8 aa, Artificial
  helical interface sequence
QDIIAILG

SEQ ID NO: 14024 - protein, 5 aa, Artificial
  helical interface sequence
VPRDL

SEQ ID NO: 14025 - protein, 14 aa, Artificial
  helical interface sequence
RSTVAQLVQTLEQH

SEQ ID NO: 14026 - protein, 19 aa, Artificial
  helical interface sequence
YTLANQMLTAMAQGYAAEI

SEQ ID NO: 14027 - protein, 15 aa, Artificial
  helical interface sequence
KIQKLESDVSAQMEY

SEQ ID NO: 14028 - protein, 38 aa, Artificial; identical to SEQ ID NO: 8796
  helical interface sequence

SEQ ID NO: 14029 - protein, 12 aa, Artificial
  helical interface sequence
AMDVVYALKRQG

SEQ ID NO: 14030 - protein, 6 aa, Artificial
  helical interface sequence
PALVFN

SEQ ID NO: 14031 - protein, 6 aa, Artificial
  helical interface sequence
PALVFN

SEQ ID NO: 14032 - protein, 13 aa, Artificial
  helical interface sequence
VHEKLRWTFNLYD

SEQ ID NO: 14033 - protein, 8 aa, Artificial
  helical interface sequence
EASLKKVL

SEQ ID NO: 14034 - protein, 22 aa, Artificial
  helical interface sequence
TVQCWSETLAYDCALMNTALET

SEQ ID NO: 14035 - protein, 22 aa, Artificial
  helical interface sequence
TVQCWSETLAYDCALMNTALET

SEQ ID NO: 14036 - protein, 10 aa, Artificial
  helical interface sequence
RPDAEYWNSQ

SEQ ID NO: 14037 - protein, 15 aa, Artificial
  helical interface sequence
IELAFSSVEHIMRDV

SEQ ID NO: 14038 - protein, 22 aa, Artificial
  helical interface sequence
EEGKALVHHYEECAERVKIQQQ

SEQ ID NO: 14039 - protein, 21 aa, Artificial
  helical interface sequence
DAAQGKTRTLMEKDSYPRFLK

SEQ ID NO: 14040 - protein, 7 aa, Artificial
  helical interface sequence
PEKYIQA

SEQ ID NO: 14041 - protein, 5 aa, Artificial
  helical interface sequence
KKDIF

SEQ ID NO: 14042 - protein, 32 aa, Artificial
  helical interface sequence
MATVTFGFSAQSDEARHMTLGLEVIKFILEQH

SEQ ID NO: 14043 - protein, 9 aa, Artificial
  helical interface sequence
RPDAEYWNS

SEQ ID NO: 14044 - protein, 11 aa, Artificial
  helical interface sequence
RQVFLATWKDI

SEQ ID NO: 14045 - protein, 9 aa, Artificial
  helical interface sequence
AAELRHVMT

SEQ ID NO: 14046 - protein, 6 aa, Artificial
  helical interface sequence
HEILEM

SEQ ID NO: 14047 - protein, 25 aa, Artificial
  helical interface sequence
PEGLRVFYYLVQDLKCLVFSLIGLH

SEQ ID NO: 14048 - protein, 5 aa, Artificial
  helical interface sequence
TNKFM

SEQ ID NO: 14049 - protein, 5 aa, Artificial
  helical interface sequence
TNKFM

SEQ ID NO: 14050 - protein, 10 aa, Artificial
  helical interface sequence
RNEMRALVCG

SEQ ID NO: 14051 - protein, 7 aa, Artificial
  helical interface sequence
YELTKSS

SEQ ID NO: 14052 - protein, 15 aa, Artificial
  helical interface sequence
VKDIYAYLRQLEEEQ

SEQ ID NO: 14053 - protein, 7 aa, Artificial
  helical interface sequence
TELFYKG

SEQ ID NO: 14054 - protein, 69 aa, Artificial; identical to SEQ ID NO: 2946
  helical interface sequence

SEQ ID NO: 14055 - protein, 8 aa, Artificial
  helical interface sequence
TDILATVL

SEQ ID NO: 14056 - protein, 11 aa, Artificial
  helical interface sequence
REDFVKIYKQF

SEQ ID NO: 14057 - protein, 10 aa, Artificial
  helical interface sequence
EKLSWAFELY

SEQ ID NO: 14058 - protein, 9 aa, Artificial
  helical interface sequence
LEAVRQEMR

SEQ ID NO: 14059 - protein, 11 aa, Artificial
  helical interface sequence
VAQRLMQHLAE

SEQ ID NO: 14060 - protein, 12 aa, Artificial
  helical interface sequence
HHFVRALVRVCG

SEQ ID NO: 14061 - protein, 10 aa, Artificial
  helical interface sequence
WRVRYMVADK

SEQ ID NO: 14062 - protein, 10 aa, Artificial
  helical interface sequence
VGRIHRLLRK

SEQ ID NO: 14063 - protein, 13 aa, Artificial
  helical interface sequence
VKAVFDAAIKVVL

SEQ ID NO: 14064 - protein, 9 aa, Artificial
  helical interface sequence
PGRFAKLLL

SEQ ID NO: 14065 - protein, 9 aa, Artificial
  helical interface sequence
PGRFAKLLL

SEQ ID NO: 14066 - protein, 10 aa, Artificial
  helical interface sequence
FWMLNTIGWV

SEQ ID NO: 14067 - protein, 12 aa, Artificial
  helical interface sequence
DEELQEMIDEAD

SEQ ID NO: 14068 - protein, 5 aa, Artificial
  helical interface sequence
IVEQC

SEQ ID NO: 14069 - protein, 24 aa, Artificial
  helical interface sequence
PRDKLACITKCSKHIFNAIKITKN

SEQ ID NO: 14070 - protein, 18 aa, Artificial
  helical interface sequence
ISVCNNATWAIGEISIQM

SEQ ID NO: 14071 - protein, 10 aa, Artificial
  helical interface sequence
KTCLLISYTT

SEQ ID NO: 14072 - protein, 21 aa, Artificial
  helical interface sequence
WGRIVAFFSFGGALCVESVDK

SEQ ID NO: 14073 - protein, 5 aa, Artificial
  helical interface sequence
VNSIA

SEQ ID NO: 14074 - protein, 9 aa, Artificial
  helical interface sequence
FTSRTSACG

SEQ ID NO: 14075 - protein, 12 aa, Artificial
  helical interface sequence
REESLQLMDLLG

SEQ ID NO: 14076 - protein, 6 aa, Artificial
  helical interface sequence
KEWAHA

SEQ ID NO: 14077 - protein, 16 aa, Artificial
  helical interface sequence
EGTLLLWCDIIGQTTY

SEQ ID NO: 14078 - protein, 40 aa, Artificial
  helical interface sequence
APLQSKLDAKKAKLSKLEELSDKIDELDAEIAKLEDQLKA

SEQ ID NO: 14079 - protein, 5 aa, Artificial
  helical interface sequence
EARLR

SEQ ID NO: 14080 - protein, 7 aa, Artificial
  helical interface sequence
IRRASML

SEQ ID NO: 14081 - protein, 27 aa, Artificial
  helical interface sequence
VAIRIFQGCQFRSVEAVQEITEYAKSI

SEQ ID NO: 14082 - protein, 15 aa, Artificial
  helical interface sequence
LSRLMHFARCCASFK

SEQ ID NO: 14083 - protein, 9 aa, Artificial
  helical interface sequence
ASVTANLTG

SEQ ID NO: 14084 - protein, 9 aa, Artificial
  helical interface sequence
ASVTANLTG

SEQ ID NO: 14085 - protein, 8 aa, Artificial
  helical interface sequence
KEDFRYRS

SEQ ID NO: 14086 - protein, 14 aa, Artificial
  helical interface sequence
GDVLYELLQHILKQ

SEQ ID NO: 14087 - protein, 12 aa, Artificial
  helical interface sequence
DYTRAAVRMAEE

SEQ ID NO: 14088 - protein, 13 aa, Artificial
  helical interface sequence
DYTRAAVRMAEEH

SEQ ID NO: 14089 - protein, 10 aa, Artificial
  helical interface sequence
PAPATTFAHL

SEQ ID NO: 14090 - protein, 7 aa, Artificial
  helical interface sequence
LEDLLLG

SEQ ID NO: 14091 - protein, 7 aa, Artificial
  helical interface sequence
WLDYFAL

SEQ ID NO: 14092 - protein, 6 aa, Artificial
  helical interface sequence
EIKDIL

SEQ ID NO: 14093 - protein, 29 aa, Artificial
  helical interface sequence
RRDFLYYATAGAGAVATGAAVWPLINQMN

SEQ ID NO: 14094 - protein, 29 aa, Artificial
  helical interface sequence
RRDFLYYATAGAGAVATGAAVWPLINQMN

SEQ ID NO: 14095 - protein, 15 aa, Artificial
  helical interface sequence
VDLAFASVEHIMRNV

SEQ ID NO: 14096 - protein, 15 aa, Artificial
  helical interface sequence
VDLAFASVEHIMRNV

SEQ ID NO: 14097 - protein, 15 aa, Artificial
  helical interface sequence
VDLAFASVEHIMRNV

SEQ ID NO: 14098 - protein, 26 aa, Artificial
  helical interface sequence
RRMKANARERNRMHGLNAALDNLRKV

SEQ ID NO: 14099 - protein, 12 aa, Artificial
  helical interface sequence
QYRILKFVALNC

SEQ ID NO: 14100 - protein, 5 aa, Artificial
  helical interface sequence
EMDDF

SEQ ID NO: 14101 - protein, 18 aa, Artificial
  helical interface sequence
PVNFKLLGQCFLVVVAIH

SEQ ID NO: 14102 - protein, 11 aa, Artificial
  helical interface sequence
VKTSLSLLTLN

SEQ ID NO: 14103 - protein, 11 aa, Artificial
  helical interface sequence
LVTVTAELAAS

SEQ ID NO: 14104 - protein, 7 aa, Artificial
  helical interface sequence
LRVITQN

SEQ ID NO: 14105 - protein, 16 aa, Artificial
  helical interface sequence
TDEVLQFLESFIDEKE

SEQ ID NO: 14106 - protein, 18 aa, Artificial
  helical interface sequence
ENFKLLGNVLVVVLARHH

SEQ ID NO: 14107 - protein, 8 aa, Artificial
  helical interface sequence
IDEVNRTF

SEQ ID NO: 14108 - protein, 13 aa, Artificial
  helical interface sequence
ANKRLDAVNRITA

SEQ ID NO: 14109 - protein, 25 aa, Artificial
  helical interface sequence
LKDAEAVQKFFLEEIQLGEELLAQG

SEQ ID NO: 14110 - protein, 6 aa, Artificial
  helical interface sequence
AKDVFL

SEQ ID NO: 14111 - protein, 10 aa, Artificial
  helical interface sequence
HVATLACVNK

SEQ ID NO: 14112 - protein, 7 aa, Artificial
  helical interface sequence
TELFYKG

SEQ ID NO: 14113 - protein, 51 aa, Artificial; identical to SEQ ID NO: 4146
  helical interface sequence

SEQ ID NO: 14114 - protein, 12 aa, Artificial
  helical interface sequence
RWFLDKLVDEIG

SEQ ID NO: 14115 - protein, 9 aa, Artificial
  helical interface sequence
DFYFNAINK

SEQ ID NO: 14116 - protein, 30 aa, Artificial
  helical interface sequence
TEFINKFLEFSNRVYEALYYVHSLLYSSMT

SEQ ID NO: 14117 - protein, 12 aa, Artificial
  helical interface sequence
GRGAENLLSQLA

SEQ ID NO: 14118 - protein, 6 aa, Artificial
  helical interface sequence
RPLWRH

SEQ ID NO: 14119 - protein, 9 aa, Artificial
  helical interface sequence
LPRLIEIVD

SEQ ID NO: 14120 - protein, 17 aa, Artificial
  helical interface sequence
RYEIARVISARALQLAM

SEQ ID NO: 14121 - protein, 13 aa, Artificial
  helical interface sequence
DLKNLISNKEVLV

SEQ ID NO: 14122 - protein, 11 aa, Artificial
  helical interface sequence
HFNEVFISLWQ

SEQ ID NO: 14123 - protein, 6 aa, Artificial
  helical interface sequence
ISEVIH

SEQ ID NO: 14124 - protein, 16 aa, Artificial
  helical interface sequence
PHLLWEVVRWQLAKRR

SEQ ID NO: 14125 - protein, 35 aa, Artificial
  helical interface sequence
RKARETLFAAGNYAYAHRKRRKRDFRRLWIVRINA

SEQ ID NO: 14126 - protein, 22 aa, Artificial
  helical interface sequence
LAETRSVDIVTGADVLEYYAGL

SEQ ID NO: 14127 - protein, 12 aa, Artificial
  helical interface sequence
LMASIIYDALVS

SEQ ID NO: 14128 - protein, 10 aa, Artificial
  helical interface sequence
ASIIYDALVS

SEQ ID NO: 14129 - protein, 22 aa, Artificial
  helical interface sequence
NADSRILIEKARVEAQSHRLTL

SEQ ID NO: 14130 - protein, 22 aa, Artificial
  helical interface sequence
IPDARNAALRAKAEAAEFRYKY

SEQ ID NO: 14131 - protein, 5 aa, Artificial
  helical interface sequence
IKESA

SEQ ID NO: 14132 - protein, 7 aa, Artificial
  helical interface sequence
ADEMLSR

SEQ ID NO: 14133 - protein, 10 aa, Artificial
  helical interface sequence
RRKVDWLTEK

SEQ ID NO: 14134 - protein, 6 aa, Artificial
  helical interface sequence
TNEVAE

SEQ ID NO: 14135 - protein, 13 aa, Artificial
  helical interface sequence
RRKVDWLTEKMHA

SEQ ID NO: 14136 - protein, 84 aa, Artificial
  helical interface sequence
EDLRQQLQQAEEALVAKQELIDKLKEEAEQHKIVMETVPVLKAQADIYKADFQAERHAREKLVEKKEYLQEQLEQLQREFNKLK

SEQ ID NO: 14137 - protein, 17 aa, Artificial
  helical interface sequence
PVTGLWMSAIGVVGLAL

SEQ ID NO: 14138 - protein, 8 aa, Artificial
  helical interface sequence
KINLLGFL

SEQ ID NO: 14139 - protein, 8 aa, Artificial
  helical interface sequence
KLIMKERR

SEQ ID NO: 14140 - protein, 7 aa, Artificial
  helical interface sequence
GLFYSIF

SEQ ID NO: 14141 - protein, 10 aa, Artificial
  helical interface sequence
EHVVDTCRKF

SEQ ID NO: 14142 - protein, 9 aa, Artificial
  helical interface sequence
EHVVDTCRK

SEQ ID NO: 14143 - protein, 12 aa, Artificial
  helical interface sequence
KYHLLLQELVKH

SEQ ID NO: 14144 - protein, 17 aa, Artificial
  helical interface sequence
YIAPIIGTIIVFLMVVY

SEQ ID NO: 14145 - protein, 15 aa, Artificial
  helical interface sequence
AFELQTILRRVLAKR

SEQ ID NO: 14146 - protein, 15 aa, Artificial
  helical interface sequence
ATELMNILNKVVTRH

SEQ ID NO: 14147 - protein, 5 aa, Artificial
  helical interface sequence
RKSIY

SEQ ID NO: 14148 - protein, 28 aa, Artificial
  helical interface sequence
GLWTFIALHGAFGLIGFMLRQFEIARLV

SEQ ID NO: 14149 - protein, 12 aa, Artificial
  helical interface sequence
IFRFLLFFQGFH

SEQ ID NO: 14150 - protein, 26 aa, Artificial
  helical interface sequence
FPFFVVGVVHLISSAVLGFGGVYHAI

SEQ ID NO: 14151 - protein, 7 aa, Artificial
  helical interface sequence
EELNKLL

SEQ ID NO: 14152 - protein, 15 aa, Artificial
  helical interface sequence
DRKNTLEEYIYTLRG

SEQ ID NO: 14153 - protein, 8 aa, Artificial
  helical interface sequence
EEIVEYAV

SEQ ID NO: 14154 - protein, 7 aa, Artificial
  helical interface sequence
SSFYVNG

SEQ ID NO: 14155 - protein, 6 aa, Artificial
  helical interface sequence
AWRRDL

SEQ ID NO: 14156 - protein, 29 aa, Artificial
  helical interface sequence
GWLIRNLHANGASFFFICIFLHIGRGLYY

SEQ ID NO: 14157 - protein, 10 aa, Artificial
  helical interface sequence
PIMQTALRRL

SEQ ID NO: 14158 - protein, 10 aa, Artificial
  helical interface sequence
GNDIVSWLWG

SEQ ID NO: 14159 - protein, 11 aa, Artificial
  helical interface sequence
LSDQMSVLQSV

SEQ ID NO: 14160 - protein, 6 aa, Artificial
  helical interface sequence
NVALPR

SEQ ID NO: 14161 - protein, 15 aa, Artificial
  helical interface sequence
AQQIEAARVAMVRHF

SEQ ID NO: 14162 - protein, 12 aa, Artificial
  helical interface sequence
ETAFQGMLRKLD

SEQ ID NO: 14163 - protein, 13 aa, Artificial
  helical interface sequence
AITAVINASDVQG

SEQ ID NO: 14164 - protein, 13 aa, Artificial
  helical interface sequence
AITAVINASDVQG

SEQ ID NO: 14165 - protein, 7 aa, Artificial
  helical interface sequence
IVDRFLA

SEQ ID NO: 14166 - protein, 19 aa, Artificial
  helical interface sequence
PENFRLLGNMIVIVLGHHL

SEQ ID NO: 14167 - protein, 16 aa, Artificial
  helical interface sequence
FLAFKEMFLDYRAEKE

SEQ ID NO: 14168 - protein, 9 aa, Artificial
  helical interface sequence
KSTKEWLIH

SEQ ID NO: 14169 - protein, 5 aa, Artificial
  helical interface sequence
LSTSE

SEQ ID NO: 14170 - protein, 5 aa, Artificial
  helical interface sequence
LSTSE

SEQ ID NO: 14171 - protein, 7 aa, Artificial
  helical interface sequence
PQGLRDN

SEQ ID NO: 14172 - protein, 13 aa, Artificial
  helical interface sequence
PENRENTAEIMFE

SEQ ID NO: 14173 - protein, 24 aa, Artificial
  helical interface sequence
AAEYYRAYLEGECVEWLHRYLKNG

SEQ ID NO: 14174 - protein, 24 aa, Artificial
  helical interface sequence
AAEYYRAYLEGECVEWLHRYLKNG

SEQ ID NO: 14175 - protein, 7 aa, Artificial
  helical interface sequence
SEQLTSG

SEQ ID NO: 14176 - protein, 5 aa, Artificial
  helical interface sequence
EKTFG

SEQ ID NO: 14177 - protein, 10 aa, Artificial
  helical interface sequence
RRKVDWLTEK

SEQ ID NO: 14178 - protein, 12 aa, Artificial
  helical interface sequence
LIKYKDFILSKF

SEQ ID NO: 14179 - protein, 7 aa, Artificial
  helical interface sequence
KDIRKIL

SEQ ID NO: 14180 - protein, 10 aa, Artificial
  helical interface sequence
LLAYLRRKLG

SEQ ID NO: 14181 - protein, 16 aa, Artificial
  helical interface sequence
EEWKFDTLCDLYDTLT

SEQ ID NO: 14182 - protein, 14 aa, Artificial
  helical interface sequence
KRKVDWLTEKMREA

SEQ ID NO: 14183 - protein, 14 aa, Artificial
  helical interface sequence
EMGFAGIAVGAAMA

SEQ ID NO: 14184 - protein, 25 aa, Artificial
  helical interface sequence
VEELKEIDVEVRKEIEDAAQFATAD

SEQ ID NO: 14185 - protein, 7 aa, Artificial
  helical interface sequence
FNFSMQA

SEQ ID NO: 14186 - protein, 19 aa, Artificial
  helical interface sequence
KKVRKKGLAMAVADRAREG

SEQ ID NO: 14187 - protein, 23 aa, Artificial
  helical interface sequence
VKYIEGLQWRTQQILTEHIRMMQ

SEQ ID NO: 14188 - protein, 17 aa, Artificial
  helical interface sequence
GHCKNLEPKYKELGEKL

SEQ ID NO: 14189 - protein, 10 aa, Artificial
  helical interface sequence
TEMITTLKKI

SEQ ID NO: 14190 - protein, 11 aa, Artificial
  helical interface sequence
QEVKMVAWWIG

SEQ ID NO: 14191 - protein, 24 aa, Artificial
  helical interface sequence
LDDQVILLRAGWNELLIASFSHRS

SEQ ID NO: 14192 - protein, 23 aa, Artificial
  helical interface sequence
PAEVEALREKVYASLEAYCKHKY

SEQ ID NO: 14193 - protein, 12 aa, Artificial
  helical interface sequence
YAAYLNVAAQAI

SEQ ID NO: 14194 - protein, 7 aa, Artificial
  helical interface sequence
AELFYKG

SEQ ID NO: 14195 - protein, 12 aa, Artificial
  helical interface sequence
FPEFLTMMARKM

SEQ ID NO: 14196 - protein, 12 aa, Artificial
  helical interface sequence
EEEIREAFRVFD

SEQ ID NO: 14197 - protein, 22 aa, Artificial
  helical interface sequence
MYLLKDLWQKRQKQVKDNENVV

SEQ ID NO: 14198 - protein, 11 aa, Artificial
  helical interface sequence
GCQLQEALLQQ

SEQ ID NO: 14199 - protein, 33 aa, Artificial
  helical interface sequence
SEECKRQMLTASHTLAVDAKNLLDAVDQAKVLA

SEQ ID NO: 14200 - protein, 6 aa, Artificial
  helical interface sequence
LSEVMT

SEQ ID NO: 14201 - protein, 12 aa, Artificial
  helical interface sequence
SNAILRYIARKH

SEQ ID NO: 14202 - protein, 15 aa, Artificial
  helical interface sequence
PEVKRRIMLGTFALS

SEQ ID NO: 14203 - protein, 7 aa, Artificial
  helical interface sequence
PEYFIKG

SEQ ID NO: 14204 - protein, 11 aa, Artificial
  helical interface sequence
EETRAELSQLC

SEQ ID NO: 14205 - protein, 22 aa, Artificial
  helical interface sequence
RSMVEGQIEGGVTMGQGFVLME

SEQ ID NO: 14206 - protein, 16 aa, Artificial
  helical interface sequence
IKIHAAVRYAVERCAN

SEQ ID NO: 14207 - protein, 16 aa, Artificial
  helical interface sequence
PVNFKLLSHCLLVTLA

SEQ ID NO: 14208 - protein, 11 aa, Artificial
  helical interface sequence
PQLKFAMQRDL

SEQ ID NO: 14209 - protein, 16 aa, Artificial
  helical interface sequence
LKQLQSAMEQLDAGAN

SEQ ID NO: 14210 - protein, 12 aa, Artificial
  helical interface sequence
DRYCESIMRRRG

SEQ ID NO: 14211 - protein, 5 aa, Artificial
  helical interface sequence
WPILG

SEQ ID NO: 14212 - protein, 18 aa, Artificial
  helical interface sequence
ELFQNLAKDLAMHIAMMN

SEQ ID NO: 14213 - protein, 7 aa, Artificial
  helical interface sequence
EELNKLL

SEQ ID NO: 14214 - protein, 16 aa, Artificial
  helical interface sequence
ALDAVESGCAMCEREQ

SEQ ID NO: 14215 - protein, 28 aa, Artificial
  helical interface sequence
EWAGQLHFWMMFIGSNLIFFPQHFLGRQ

SEQ ID NO: 14216 - protein, 8 aa, Artificial
  helical interface sequence
AFDISIDN

SEQ ID NO: 14217 - protein, 19 aa, Artificial
  helical interface sequence
PQQACKEAVERIVKIVNRR

SEQ ID NO: 14218 - protein, 5 aa, Artificial
  helical interface sequence
LQNTY

SEQ ID NO: 14219 - protein, 8 aa, Artificial
  helical interface sequence
LFDYLNRY

SEQ ID NO: 14220 - protein, 14 aa, Artificial
  helical interface sequence
GNKRLDAVNYIVSN

SEQ ID NO: 14221 - protein, 11 aa, Artificial
  helical interface sequence
QNALEKEVESM

SEQ ID NO: 14222 - protein, 6 aa, Artificial
  helical interface sequence
YNRIRS

SEQ ID NO: 14223 - protein, 18 aa, Artificial
  helical interface sequence
EKCVKARERLELCDERVS

SEQ ID NO: 14224 - protein, 8 aa, Artificial
  helical interface sequence
RWEVAALQ

SEQ ID NO: 14225 - protein, 34 aa, Artificial; identical to SEQ ID NO: 2403
  helical interface sequence

SEQ ID NO: 14226 - protein, 23 aa, Artificial
  helical interface sequence
AQGALANIAVDKANLEIMTKRSN

SEQ ID NO: 14227 - protein, 6 aa, Artificial
  helical interface sequence
DEQLKS

SEQ ID NO: 14228 - protein, 6 aa, Artificial
  helical interface sequence
RQVSDL

SEQ ID NO: 14229 - protein, 6 aa, Artificial
  helical interface sequence
FEQILR

SEQ ID NO: 14230 - protein, 6 aa, Artificial
  helical interface sequence
LMEIAE

SEQ ID NO: 14231 - protein, 17 aa, Artificial
  helical interface sequence
EKFRDVYDYFRAVLQRD

SEQ ID NO: 14232 - protein, 12 aa, Artificial
  helical interface sequence
LAELVKKLEDKF

SEQ ID NO: 14233 - protein, 28 aa, Artificial
  helical interface sequence
SQMWLQLSQSLKGWDHMFTVDFWTIMEN

SEQ ID NO: 14234 - protein, 11 aa, Artificial
  helical interface sequence
YEDFVKKVMAG

SEQ ID NO: 14235 - protein, 18 aa, Artificial
  helical interface sequence
QDEIDDLKDVFELFDFWD

SEQ ID NO: 14236 - protein, 7 aa, Artificial
  helical interface sequence
YFAEVEQ

SEQ ID NO: 14237 - protein, 13 aa, Artificial
  helical interface sequence
FKYGAKLGTVVRK

SEQ ID NO: 14238 - protein, 6 aa, Artificial
  helical interface sequence
SEQLTS

SEQ ID NO: 14239 - protein, 13 aa, Artificial
  helical interface sequence
EEQWEREVEKVLN

SEQ ID NO: 14240 - protein, 21 aa, Artificial
  helical interface sequence
ITTTMTDSFLTGQILLQDLKA

SEQ ID NO: 14241 - protein, 9 aa, Artificial
  helical interface sequence
DEENDMLDL

SEQ ID NO: 14242 - protein, 5 aa, Artificial
  helical interface sequence
EAEKN

SEQ ID NO: 14243 - protein, 15 aa, Artificial
  helical interface sequence
REDAVLEYLKIAQDL

SEQ ID NO: 14244 - protein, 5 aa, Artificial
  helical interface sequence
EHDFF

SEQ ID NO: 14245 - protein, 9 aa, Artificial
  helical interface sequence
VNWIQQTIA

SEQ ID NO: 14246 - protein, 8 aa, Artificial
  helical interface sequence
AQLRRKLE

SEQ ID NO: 14247 - protein, 6 aa, Artificial
  helical interface sequence
IENFLA

SEQ ID NO: 14248 - protein, 7 aa, Artificial
  helical interface sequence
LMGEILN

SEQ ID NO: 14249 - protein, 6 aa, Artificial
  helical interface sequence
SEQLTS

SEQ ID NO: 14250 - protein, 11 aa, Artificial
  helical interface sequence
KELIINEILVM

SEQ ID NO: 14251 - protein, 12 aa, Artificial
  helical interface sequence
SGIRILLNEVFN

SEQ ID NO: 14252 - protein, 14 aa, Artificial
  helical interface sequence
PVLITLACMHLTMN

SEQ ID NO: 14253 - protein, 17 aa, Artificial
  helical interface sequence
KEELHQCCDLVDIAIVS

SEQ ID NO: 14254 - protein, 12 aa, Artificial
  helical interface sequence
SREIQTAVRLLL

SEQ ID NO: 14255 - protein, 7 aa, Artificial
  helical interface sequence
KAEAINT

SEQ ID NO: 14256 - protein, 18 aa, Artificial
  helical interface sequence
SFPILTVTVALLTLDRYL

SEQ ID NO: 14257 - protein, 11 aa, Artificial
  helical interface sequence
RYIAADAVEAV

SEQ ID NO: 14258 - protein, 5 aa, Artificial
  helical interface sequence
VCRDG

SEQ ID NO: 14259 - protein, 19 aa, Artificial
  helical interface sequence
PVNFKLLSHCLLVTLACHH

SEQ ID NO: 14260 - protein, 21 aa, Artificial
  helical interface sequence
AADGDALVKRFKNSVKWYHFD

SEQ ID NO: 14261 - protein, 13 aa, Artificial
  helical interface sequence
FQVEYAVKAVENG

SEQ ID NO: 14262 - protein, 10 aa, Artificial
  helical interface sequence
DELLLGIFSC

SEQ ID NO: 14263 - protein, 14 aa, Artificial
  helical interface sequence
QGTLFELILAANYL

SEQ ID NO: 14264 - protein, 11 aa, Artificial
  helical interface sequence
DELLLGIFSCL

SEQ ID NO: 14265 - protein, 19 aa, Artificial
  helical interface sequence
PVNFKLLSHSLLVTLASHL

SEQ ID NO: 14266 - protein, 19 aa, Artificial
  helical interface sequence
PVNFKLLSHSLLVTLASHL

SEQ ID NO: 14267 - protein, 23 aa, Artificial
  helical interface sequence
AGDTVQFAEYIQANIQLYSIRED

SEQ ID NO: 14268 - protein, 23 aa, Artificial
  helical interface sequence
ATDVTTLNEMFRYKTNLYKLKEE

SEQ ID NO: 14269 - protein, 14 aa, Artificial
  helical interface sequence
YSGFYTFSLLDHHY

SEQ ID NO: 14270 - protein, 13 aa, Artificial
  helical interface sequence
VGELFWKVKEEEG

SEQ ID NO: 14271 - protein, 14 aa, Artificial
  helical interface sequence
FGAHMANPLLRKVV

SEQ ID NO: 14272 - protein, 6 aa, Artificial
  helical interface sequence
ILLEEM

SEQ ID NO: 14273 - protein, 6 aa, Artificial
  helical interface sequence
ILLEEM

SEQ ID NO: 14274 - protein, 18 aa, Artificial
  helical interface sequence
TADAFTLFELFERKLEMH

SEQ ID NO: 14275 - protein, 5 aa, Artificial
  helical interface sequence
PYESQ

SEQ ID NO: 14276 - protein, 5 aa, Artificial
  helical interface sequence
PYESQ

SEQ ID NO: 14277 - protein, 5 aa, Artificial
  helical interface sequence
PYESQ

SEQ ID NO: 14278 - protein, 13 aa, Artificial
  helical interface sequence
TAQIDALSQMVAE

SEQ ID NO: 14279 - protein, 12 aa, Artificial
  helical interface sequence
PLTEAVSVADSQ

SEQ ID NO: 14280 - protein, 5 aa, Artificial
  helical interface sequence
VVFAE

SEQ ID NO: 14281 - protein, 5 aa, Artificial
  helical interface sequence
IETTE

SEQ ID NO: 14282 - protein, 10 aa, Artificial
  helical interface sequence
VSSTRRSLAA

SEQ ID NO: 14283 - protein, 16 aa, Artificial
  helical interface sequence
QGCVAYFRTYFNRHFK

SEQ ID NO: 14284 - protein, 10 aa, Artificial
  helical interface sequence
SSKMLQINAD

SEQ ID NO: 14285 - protein, 9 aa, Artificial
  helical interface sequence
SSKMLQINA

SEQ ID NO: 14286 - protein, 13 aa, Artificial
  helical interface sequence
ETGKALIQTCLNS

SEQ ID NO: 14287 - protein, 5 aa, Artificial
  helical interface sequence
SEQLT

SEQ ID NO: 14288 - protein, 14 aa, Artificial
  helical interface sequence
PLSISSALAMIFLG

SEQ ID NO: 14289 - protein, 30 aa, Artificial; identical to SEQ ID NO: 1334
  helical interface sequence

SEQ ID NO: 14290 - protein, 16 aa, Artificial
  helical interface sequence
AEEYGAETLERMFTAY

SEQ ID NO: 14291 - protein, 16 aa, Artificial
  helical interface sequence
AEEYGAETLERMFTAY

SEQ ID NO: 14292 - protein, 12 aa, Artificial
  helical interface sequence
HTLGNLIRAELL

SEQ ID NO: 14293 - protein, 5 aa, Artificial
  helical interface sequence
EEFAK

SEQ ID NO: 14294 - protein, 14 aa, Artificial
  helical interface sequence
GNKRLDAVNRITSN

SEQ ID NO: 14295 - protein, 9 aa, Artificial
  helical interface sequence
FEDYVEGLR

SEQ ID NO: 14296 - protein, 13 aa, Artificial
  helical interface sequence
VLDGIVSYDRAET

SEQ ID NO: 14297 - protein, 10 aa, Artificial
  helical interface sequence
PRHLQLAIRN

SEQ ID NO: 14298 - protein, 12 aa, Artificial
  helical interface sequence
AREIQTAVRLIL

SEQ ID NO: 14299 - protein, 7 aa, Artificial
  helical interface sequence
SEQLTSG

SEQ ID NO: 14300 - protein, 13 aa, Artificial
  helical interface sequence
TAAQITQRKWEAA

SEQ ID NO: 14301 - protein, 21 aa, Artificial
  helical interface sequence
NAPGAAANRVALEACTQARNE

SEQ ID NO: 14302 - protein, 21 aa, Artificial
  helical interface sequence
NAPGAAANRVALEACTQARNE

SEQ ID NO: 14303 - protein, 21 aa, Artificial
  helical interface sequence
NAPGAAANRVALEACTQARNE

SEQ ID NO: 14304 - protein, 14 aa, Artificial
  helical interface sequence
AKNYGRAVYECLRG

SEQ ID NO: 14305 - protein, 14 aa, Artificial
  helical interface sequence
AKNYGRAVYECLRG

SEQ ID NO: 14306 - protein, 18 aa, Artificial
  helical interface sequence
KYRLTVVVAKRAQQLLRH

SEQ ID NO: 14307 - protein, 5 aa, Artificial
  helical interface sequence
WTDLL

SEQ ID NO: 14308 - protein, 9 aa, Artificial
  helical interface sequence
VILERERLD

SEQ ID NO: 14309 - protein, 12 aa, Artificial
  helical interface sequence
EEKSKMLARLLK

SEQ ID NO: 14310 - protein, 20 aa, Artificial
  helical interface sequence
PEDLRAANKLIKEMVQEDQK

SEQ ID NO: 14311 - protein, 12 aa, Artificial
  helical interface sequence
SLDMKYFCAVTT

SEQ ID NO: 14312 - protein, 17 aa, Artificial
  helical interface sequence
RGYWQELIETLVWAHER

SEQ ID NO: 14313 - protein, 19 aa, Artificial
  helical interface sequence
VEDALYLGKRSILAAAHRD

SEQ ID NO: 14314 - protein, 22 aa, Artificial
  helical interface sequence
TADAEILINTARIHAQNYLKTY

SEQ ID NO: 14315 - protein, 21 aa, Artificial
  helical interface sequence
AADGDALVKRFKNSVKWYHFD

SEQ ID NO: 14316 - protein, 7 aa, Artificial
  helical interface sequence
PESLNAS

SEQ ID NO: 14317 - protein, 7 aa, Artificial
  helical interface sequence
PESLNAS

SEQ ID NO: 14318 - protein, 19 aa, Artificial
  helical interface sequence
PENFRLLGNVLVCVLAHHF

SEQ ID NO: 14319 - protein, 16 aa, Artificial
  helical interface sequence
PVNFKLLSHCLLVTLA

SEQ ID NO: 14320 - protein, 23 aa, Artificial
  helical interface sequence
PPVQAAYQKVVAGVANALAHKYH

SEQ ID NO: 14321 - protein, 27 aa, Artificial
  helical interface sequence
PFHGLSIAFLYGSALLFAMHGATILAV

SEQ ID NO: 14322 - protein, 27 aa, Artificial
  helical interface sequence
EPVFWGLFGAGGMWSAIIAPVMILLVG

SEQ ID NO: 14323 - protein, 6 aa, Artificial
  helical interface sequence
YCSEVC

SEQ ID NO: 14324 - protein, 21 aa, Artificial
  helical interface sequence
PAAAIQQGKVESSKDFLIATL

SEQ ID NO: 14325 - protein, 10 aa, Artificial
  helical interface sequence
VCRHNYEIFD

SEQ ID NO: 14326 - protein, 10 aa, Artificial
  helical interface sequence
PRHLQLAVRN

SEQ ID NO: 14327 - protein, 13 aa, Artificial
  helical interface sequence
PFVGNDIVSWLWG

SEQ ID NO: 14328 - protein, 7 aa, Artificial
  helical interface sequence
SLYKTFF

SEQ ID NO: 14329 - protein, 7 aa, Artificial
  helical interface sequence
IYFLYEG

SEQ ID NO: 14330 - protein, 25 aa, Artificial
  helical interface sequence
EASMMGLLTNLADRELVHMINWAKR

SEQ ID NO: 14331 - protein, 22 aa, Artificial
  helical interface sequence
EKHRKMEEEREEMRQTIRDKYG

SEQ ID NO: 14332 - protein, 13 aa, Artificial
  helical interface sequence
IWTHLDWVSNTGY

SEQ ID NO: 14333 - protein, 14 aa, Artificial
  helical interface sequence
QGTLFELILAANYL

SEQ ID NO: 14334 - protein, 10 aa, Artificial
  helical interface sequence
ALDYLINSLS

SEQ ID NO: 14335 - protein, 6 aa, Artificial
  helical interface sequence
SEQLTS

SEQ ID NO: 14336 - protein, 16 aa, Artificial
  helical interface sequence
FTEYKKKLAERLKAKL

SEQ ID NO: 14337 - protein, 14 aa, Artificial
  helical interface sequence
PVSISMSLAMLSLG

SEQ ID NO: 14338 - protein, 9 aa, Artificial
  helical interface sequence
PEEVEEVIG

SEQ ID NO: 14339 - protein, 23 aa, Artificial
  helical interface sequence
SVLEHLRAKMQRMEEAIKTQKEL

SEQ ID NO: 14340 - protein, 6 aa, Artificial
  helical interface sequence
IACWIH

SEQ ID NO: 14341 - protein, 18 aa, Artificial
  helical interface sequence
LSFQRVLQRAVFHVQSSG

SEQ ID NO: 14342 - protein, 12 aa, Artificial
  helical interface sequence
TGSIEYLIQHIK

SEQ ID NO: 14343 - protein, 6 aa, Artificial
  helical interface sequence
EKDIVF

SEQ ID NO: 14344 - protein, 12 aa, Artificial
  helical interface sequence
DAWSSRILLEEM

SEQ ID NO: 14345 - protein, 6 aa, Artificial
  helical interface sequence
CMAEVI

SEQ ID NO: 14346 - protein, 11 aa, Artificial
  helical interface sequence
LWHLRSLVFTD

SEQ ID NO: 14347 - protein, 5 aa, Artificial
  helical interface sequence
RFLLS

SEQ ID NO: 14348 - protein, 14 aa, Artificial
  helical interface sequence
TIVPIVILVAIGAF

SEQ ID NO: 14349 - protein, 12 aa, Artificial
  helical interface sequence
SVWIGGSILASL

SEQ ID NO: 14350 - protein, 19 aa, Artificial
  helical interface sequence
AQETQGQAAARAAAADLAA

SEQ ID NO: 14351 - protein, 20 aa, Artificial
  helical interface sequence
QAQETQGQAAARAAAADLAA

SEQ ID NO: 14352 - protein, 7 aa, Artificial
  helical interface sequence
EYEQLSC

SEQ ID NO: 14353 - protein, 7 aa, Artificial
  helical interface sequence
PQEVHKW

SEQ ID NO: 14354 - protein, 30 aa, Artificial; identical to SEQ ID NO: 2910
  helical interface sequence

SEQ ID NO: 14355 - protein, 7 aa, Artificial
  helical interface sequence
PEFGQLA

SEQ ID NO: 14356 - protein, 12 aa, Artificial
  helical interface sequence
ELGRPDAEYWNS

SEQ ID NO: 14357 - protein, 16 aa, Artificial
  helical interface sequence
EKFRDVYDYFRAVLQR

SEQ ID NO: 14358 - protein, 14 aa, Artificial
  helical interface sequence
FLDAVWWLNEALDR

SEQ ID NO: 14359 - protein, 17 aa, Artificial
  helical interface sequence
DSKLASRKYARIIQKIG

SEQ ID NO: 14360 - protein, 22 aa, Artificial
  helical interface sequence
ASLAMRVLETFDKVVAETLKDN

SEQ ID NO: 14361 - protein, 17 aa, Artificial
  helical interface sequence
KYERARILGTRALQISM

SEQ ID NO: 14362 - protein, 19 aa, Artificial
  helical interface sequence
ESEVLRGKNLLRNALVSHL

SEQ ID NO: 14363 - protein, 16 aa, Artificial
  helical interface sequence
KTEALELKAKVDLVLG

SEQ ID NO: 14364 - protein, 16 aa, Artificial
  helical interface sequence
KTEALELKAKVDLVLG

SEQ ID NO: 14365 - protein, 12 aa, Artificial
  helical interface sequence
DLEYIEAVAGEI

SEQ ID NO: 14366 - protein, 12 aa, Artificial
  helical interface sequence
SVWIGGSILASL

SEQ ID NO: 14367 - protein, 5 aa, Artificial
  helical interface sequence
PEELG

SEQ ID NO: 14368 - protein, 6 aa, Artificial
  helical interface sequence
VENFLC

SEQ ID NO: 14369 - protein, 12 aa, Artificial
  helical interface sequence
QHKVASLVSRYV

SEQ ID NO: 14370 - protein, 9 aa, Artificial
  helical interface sequence
KEQLSALMD

SEQ ID NO: 14371 - protein, 19 aa, Artificial
  helical interface sequence
PEVHIAVDKFLAAVSAALA

SEQ ID NO: 14372 - protein, 10 aa, Artificial
  helical interface sequence
WTILNEIISM

SEQ ID NO: 14373 - protein, 10 aa, Artificial
  helical interface sequence
KILHRLLQEG

SEQ ID NO: 14374 - protein, 5 aa, Artificial
  helical interface sequence
LRFMA

SEQ ID NO: 14375 - protein, 5 aa, Artificial
  helical interface sequence
MEMYR

SEQ ID NO: 14376 - protein, 19 aa, Artificial
  helical interface sequence
MAAVKQALREAGDEFELRY

SEQ ID NO: 14377 - protein, 11 aa, Artificial
  helical interface sequence
LQAVKVFLEAH

SEQ ID NO: 14378 - protein, 6 aa, Artificial
  helical interface sequence
DEEART

SEQ ID NO: 14379 - protein, 6 aa, Artificial
  helical interface sequence
KFLDRF

SEQ ID NO: 14380 - protein, 5 aa, Artificial
  helical interface sequence
SEELQ

SEQ ID NO: 14381 - protein, 7 aa, Artificial
  helical interface sequence
FTDYLRG

SEQ ID NO: 14382 - protein, 6 aa, Artificial
  helical interface sequence
SEQLTS

SEQ ID NO: 14383 - protein, 11 aa, Artificial
  helical interface sequence
PSVTLFRQYLR

SEQ ID NO: 14384 - protein, 13 aa, Artificial
  helical interface sequence
WYFYPVFQILRVV

SEQ ID NO: 14385 - protein, 15 aa, Artificial
  helical interface sequence
TGTAEGVLATSLAKM

SEQ ID NO: 14386 - protein, 5 aa, Artificial
  helical interface sequence
STCLY

SEQ ID NO: 14387 - protein, 13 aa, Artificial
  helical interface sequence
EHVVDTCRKFIKA

SEQ ID NO: 14388 - protein, 12 aa, Artificial
  helical interface sequence
TKTMAKVITTVL

SEQ ID NO: 14389 - protein, 13 aa, Artificial
  helical interface sequence
KAEVAAEFLNDRV

SEQ ID NO: 14390 - protein, 13 aa, Artificial
  helical interface sequence
KAEVAAEFLNDRV

SEQ ID NO: 14391 - protein, 9 aa, Artificial
  helical interface sequence
RPDAENWNS

SEQ ID NO: 14392 - protein, 19 aa, Artificial
  helical interface sequence
SQQIERIVEAFSSKYSADQ

SEQ ID NO: 14393 - protein, 6 aa, Artificial
  helical interface sequence
DEQLKS

SEQ ID NO: 14394 - protein, 21 aa, Artificial
  helical interface sequence
NAPGAVANRVALEACVKARNE

SEQ ID NO: 14395 - protein, 14 aa, Artificial
  helical interface sequence
PDRITELLDAKEAA

SEQ ID NO: 14396 - protein, 7 aa, Artificial
  helical interface sequence
PTHRAAA

SEQ ID NO: 14397 - protein, 9 aa, Artificial
  helical interface sequence
TDLLPNLRR

SEQ ID NO: 14398 - protein, 13 aa, Artificial
  helical interface sequence
EKDLDFLHSVFQD

SEQ ID NO: 14399 - protein, 9 aa, Artificial
  helical interface sequence
NECMESVRN

SEQ ID NO: 14400 - protein, 17 aa, Artificial
  helical interface sequence
EQESMARLKKLMTIMDS

SEQ ID NO: 14401 - protein, 15 aa, Artificial
  helical interface sequence
IPAFADRLGQYVQAH

SEQ ID NO: 14402 - protein, 22 aa, Artificial
  helical interface sequence
TADAEILINTARIHAQNYLKTY

SEQ ID NO: 14403 - protein, 22 aa, Artificial
  helical interface sequence
AADCQFWETWLGSQCRLHELRE

SEQ ID NO: 14404 - protein, 15 aa, Artificial
  helical interface sequence
VAAASKILSNLVYQY

SEQ ID NO: 14405 - protein, 22 aa, Artificial
  helical interface sequence
TADAEILINTARIHAQNYLKTY

SEQ ID NO: 14406 - protein, 9 aa, Artificial
  helical interface sequence
DRLRPLSYP

SEQ ID NO: 14407 - protein, 30 aa, Artificial; identical to SEQ ID NO: 11699
  helical interface sequence

SEQ ID NO: 14408 - protein, 20 aa, Artificial
  helical interface sequence
DSQKKAIERMKDTLRIAYLT

SEQ ID NO: 14409 - protein, 29 aa, Artificial
  helical interface sequence
CDEKTQSLGVKFLDEYQSKVKRQIFSGYQ

SEQ ID NO: 14410 - protein, 27 aa, Artificial
  helical interface sequence
GPYQLIIFHFLLGASCYMGRQWELSYR

SEQ ID NO: 14411 - protein, 27 aa, Artificial
  helical interface sequence
PFHMMGVAGVLGGALLCAIHGATVENT

SEQ ID NO: 14412 - protein, 24 aa, Artificial
  helical interface sequence
TVLSSSIAAVFFAAFVVAGTMWYG

SEQ ID NO: 14413 - protein, 9 aa, Artificial
  helical interface sequence
FDILDDWLK

SEQ ID NO: 14414 - protein, 13 aa, Artificial
  helical interface sequence
FEDFVTALSILLR

SEQ ID NO: 14415 - protein, 8 aa, Artificial
  helical interface sequence
YTEGAELV

SEQ ID NO: 14416 - protein, 9 aa, Artificial
  helical interface sequence
TDLLPNLRR

SEQ ID NO: 14417 - protein, 61 aa, Artificial; identical to SEQ ID NO: 470
  helical interface sequence

SEQ ID NO: 14418 - protein, 5 aa, Artificial
  helical interface sequence
PTIKE

SEQ ID NO: 14419 - protein, 18 aa, Artificial
  helical interface sequence
IDDMMFVLQGQWMRLCTS

SEQ ID NO: 14420 - protein, 10 aa, Artificial
  helical interface sequence
LADALREVVG

SEQ ID NO: 14421 - protein, 10 aa, Artificial
  helical interface sequence
LADALREVVG

SEQ ID NO: 14422 - protein, 9 aa, Artificial
  helical interface sequence
PCTLNCAKF

SEQ ID NO: 14423 - protein, 10 aa, Artificial
  helical interface sequence
YKNKMMVCQV

SEQ ID NO: 14424 - protein, 5 aa, Artificial
  helical interface sequence
RCAHN

SEQ ID NO: 14425 - protein, 5 aa, Artificial
  helical interface sequence
RCAHN

SEQ ID NO: 14426 - protein, 14 aa, Artificial
  helical interface sequence
GGYTFCGLAALVIL

SEQ ID NO: 14427 - protein, 12 aa, Artificial
  helical interface sequence
LERAIRLALNDA

SEQ ID NO: 14428 - protein, 13 aa, Artificial
  helical interface sequence
FSPYQDVVRTVGN

SEQ ID NO: 14429 - protein, 7 aa, Artificial
  helical interface sequence
EELNQLL

SEQ ID NO: 14430 - protein, 15 aa, Artificial
  helical interface sequence
AATAEKVFKQYANDN

SEQ ID NO: 14431 - protein, 15 aa, Artificial
  helical interface sequence
AKNYGRAVYECLRGG

SEQ ID NO: 14432 - protein, 14 aa, Artificial
  helical interface sequence
DEQIAAQVDYIVAN

SEQ ID NO: 14433 - protein, 14 aa, Artificial
  helical interface sequence
AKNYGRAVYECLRG

SEQ ID NO: 14434 - protein, 20 aa, Artificial
  helical interface sequence
PDNFRILGDCLTVVIAANLG

SEQ ID NO: 14435 - protein, 32 aa, Artificial; identical to SEQ ID NO: 1080
  helical interface sequence

SEQ ID NO: 14436 - protein, 23 aa, Artificial
  helical interface sequence
PWPLTGALSALLMTSGLTMWFHF

SEQ ID NO: 14437 - protein, 20 aa, Artificial
  helical interface sequence
VFPVVIMGTFACIVALSVLD

SEQ ID NO: 14438 - protein, 25 aa, Artificial
  helical interface sequence
PNRVKWMIAFICLVMLAQLMLILKK

SEQ ID NO: 14439 - protein, 17 aa, Artificial
  helical interface sequence
LGVLLMASVPLGLILVP

SEQ ID NO: 14440 - protein, 9 aa, Artificial
  helical interface sequence
MHIPELADE

SEQ ID NO: 14441 - protein, 7 aa, Artificial
  helical interface sequence
VSKGDLG

SEQ ID NO: 14442 - protein, 18 aa, Artificial
  helical interface sequence
EVTDMMQKALFDFLKHRF

SEQ ID NO: 14443 - protein, 18 aa, Artificial
  helical interface sequence
QDEIDDLKDVFELFDFWD

SEQ ID NO: 14444 - protein, 15 aa, Artificial
  helical interface sequence
LERCLGLIESCYDSQ

SEQ ID NO: 14445 - protein, 13 aa, Artificial
  helical interface sequence
LEEVNNNVRLLSE

SEQ ID NO: 14446 - protein, 5 aa, Artificial
  helical interface sequence
QYIRR

SEQ ID NO: 14447 - protein, 25 aa, Artificial
  helical interface sequence
VLPLLTHFADINTFMVQQIIKFTKD

SEQ ID NO: 14448 - protein, 9 aa, Artificial
  helical interface sequence
AEDAAFIMK

SEQ ID NO: 14449 - protein, 13 aa, Artificial
  helical interface sequence
KKSLTEIKDVLAS

SEQ ID NO: 14450 - protein, 6 aa, Artificial
  helical interface sequence
IAYLTE

SEQ ID NO: 14451 - protein, 7 aa, Artificial
  helical interface sequence
KILHRLL

SEQ ID NO: 14452 - protein, 10 aa, Artificial
  helical interface sequence
LRDALSLTDQ

SEQ ID NO: 14453 - protein, 23 aa, Artificial
  helical interface sequence
VGDAQVLVRYMKAELELYRLQRR

SEQ ID NO: 14454 - protein, 9 aa, Artificial
  helical interface sequence
QAVLSLYSS

SEQ ID NO: 14455 - protein, 18 aa, Artificial
  helical interface sequence
QATLDADLAHLKSQHDPR

SEQ ID NO: 14456 - protein, 19 aa, Artificial
  helical interface sequence
AASRVSAGEEVFAALFKMV

SEQ ID NO: 14457 - protein, 18 aa, Artificial
  helical interface sequence
QATLDADLAHLKSQHDPR

SEQ ID NO: 14458 - protein, 18 aa, Artificial
  helical interface sequence
QATLDADLAHLKSQHDPR

SEQ ID NO: 14459 - protein, 23 aa, Artificial
  helical interface sequence
PAFRAHATRVLGGLDMCIALLDD

SEQ ID NO: 14460 - protein, 13 aa, Artificial
  helical interface sequence
YLTRKLVDVAHEI

SEQ ID NO: 14461 - protein, 10 aa, Artificial
  helical interface sequence
YEEFVQMMTA

SEQ ID NO: 14462 - protein, 14 aa, Artificial
  helical interface sequence
GPDYRVLVDKSRKV

SEQ ID NO: 14463 - protein, 18 aa, Artificial
  helical interface sequence
APDARVLSNYLRQQCNYS

SEQ ID NO: 14464 - protein, 15 aa, Artificial
  helical interface sequence
VERAGHLLCDKAQKN

SEQ ID NO: 14465 - protein, 22 aa, Artificial
  helical interface sequence
AADTEAVTQLIGSNIELHSLYT

SEQ ID NO: 14466 - protein, 11 aa, Artificial
  helical interface sequence
VGELFWKVKEE

SEQ ID NO: 14467 - protein, 7 aa, Artificial
  helical interface sequence
MMELAEI

SEQ ID NO: 14468 - protein, 11 aa, Artificial
  helical interface sequence
AMDVVYALKRQ

SEQ ID NO: 14469 - protein, 11 aa, Artificial
  helical interface sequence
AMDVVYALKRQ

SEQ ID NO: 14470 - protein, 27 aa, Artificial
  helical interface sequence
IYEETRGVLKVFLENVIRDAVTYTEHA

SEQ ID NO: 14471 - protein, 7 aa, Artificial
  helical interface sequence
EELNKLL

SEQ ID NO: 14472 - protein, 11 aa, Artificial
  helical interface sequence
EKEIINRVIAR

SEQ ID NO: 14473 - protein, 20 aa, Artificial
  helical interface sequence
ALANIAVDKANLEIMTKRSN

SEQ ID NO: 14474 - protein, 30 aa, Artificial; identical to SEQ ID NO: 8187
  helical interface sequence

SEQ ID NO: 14475 - protein, 12 aa, Artificial
  helical interface sequence
DEEVDEMIREAD

SEQ ID NO: 14476 - protein, 17 aa, Artificial
  helical interface sequence
MYDIGAVAMRLLTKYMN

SEQ ID NO: 14477 - protein, 9 aa, Artificial
  helical interface sequence
AARNILEKH

SEQ ID NO: 14478 - protein, 5 aa, Artificial
  helical interface sequence
GHFYS

SEQ ID NO: 14479 - protein, 13 aa, Artificial
  helical interface sequence
IGDALGFAVRYLT

SEQ ID NO: 14480 - protein, 7 aa, Artificial
  helical interface sequence
EKDIVFG

SEQ ID NO: 14481 - protein, 9 aa, Artificial
  helical interface sequence
MGNMKYLYD

SEQ ID NO: 14482 - protein, 22 aa, Artificial
  helical interface sequence
IVATVAGMGVIVIVGLFFYGAY

SEQ ID NO: 14483 - protein, 7 aa, Artificial
  helical interface sequence
CQDLRSI

SEQ ID NO: 14484 - protein, 5 aa, Artificial
  helical interface sequence
PEIVM

SEQ ID NO: 14485 - protein, 13 aa, Artificial
  helical interface sequence
YKGVKLAKFGKEN

SEQ ID NO: 14486 - protein, 14 aa, Artificial
  helical interface sequence
WQMLEMLKPCVEDG

SEQ ID NO: 14487 - protein, 9 aa, Artificial
  helical interface sequence
DTLMQRLRN

SEQ ID NO: 14488 - protein, 23 aa, Artificial
  helical interface sequence
KCTLSISVLLAQTIFLFLIAQKV

SEQ ID NO: 14489 - protein, 8 aa, Artificial
  helical interface sequence
LGSALRSL

SEQ ID NO: 14490 - protein, 8 aa, Artificial
  helical interface sequence
SACHRKCV

SEQ ID NO: 14491 - protein, 13 aa, Artificial
  helical interface sequence
NTQLDALANMIAE

SEQ ID NO: 14492 - protein, 6 aa, Artificial
  helical interface sequence
PRCAWR

SEQ ID NO: 14493 - protein, 13 aa, Artificial
  helical interface sequence
EVFMKTLNYTARF

SEQ ID NO: 14494 - protein, 13 aa, Artificial
  helical interface sequence
EVFMKTLNYTARF

SEQ ID NO: 14495 - protein, 21 aa, Artificial
  helical interface sequence
KAVANSLKSWNETLTSRLATL

SEQ ID NO: 14496 - protein, 14 aa, Artificial
  helical interface sequence
LSATEEILQEVRAS

SEQ ID NO: 14497 - protein, 11 aa, Artificial
  helical interface sequence
LGALAEASLTC

SEQ ID NO: 14498 - protein, 18 aa, Artificial
  helical interface sequence
SDRRVALAQAVFASLFSR

SEQ ID NO: 14499 - protein, 16 aa, Artificial
  helical interface sequence
VCPVLRQAAQQVLQRQ

SEQ ID NO: 14500 - protein, 7 aa, Artificial
  helical interface sequence
LRRLEMY

SEQ ID NO: 14501 - protein, 8 aa, Artificial
  helical interface sequence
HTLFRAYT

SEQ ID NO: 14502 - protein, 8 aa, Artificial
  helical interface sequence
HTLFRAYT

SEQ ID NO: 14503 - protein, 8 aa, Artificial
  helical interface sequence
PLFHALAE

SEQ ID NO: 14504 - protein, 8 aa, Artificial
  helical interface sequence
LRWKELVD

SEQ ID NO: 14505 - protein, 8 aa, Artificial
  helical interface sequence
LRWKELVD

SEQ ID NO: 14506 - protein, 8 aa, Artificial
  helical interface sequence
QGTLFELI

SEQ ID NO: 14507 - protein, 11 aa, Artificial
  helical interface sequence
FYGFGSQLLHF

SEQ ID NO: 14508 - protein, 12 aa, Artificial
  helical interface sequence
YKKLQDQRIGLS

SEQ ID NO: 14509 - protein, 5 aa, Artificial
  helical interface sequence
LDDIL

SEQ ID NO: 14510 - protein, 15 aa, Artificial
  helical interface sequence
RIAKLRVSADSFVRQ

SEQ ID NO: 14511 - protein, 12 aa, Artificial
  helical interface sequence
PAELIERLEQAW

SEQ ID NO: 14512 - protein, 9 aa, Artificial
  helical interface sequence
RAVREFFDY

SEQ ID NO: 14513 - protein, 5 aa, Artificial
  helical interface sequence
SEPSN

SEQ ID NO: 14514 - protein, 8 aa, Artificial
  helical interface sequence
EAEISHTQ

SEQ ID NO: 14515 - protein, 7 aa, Artificial
  helical interface sequence
KEDALKL

SEQ ID NO: 14516 - protein, 11 aa, Artificial
  helical interface sequence
AMDVVYALKRQ

SEQ ID NO: 14517 - protein, 9 aa, Artificial
  helical interface sequence
PLFLAAREG

SEQ ID NO: 14518 - protein, 16 aa, Artificial
  helical interface sequence
TKKKEEQLKLLKEKYG

SEQ ID NO: 14519 - protein, 14 aa, Artificial
  helical interface sequence
DTVELVMALEEEFD

SEQ ID NO: 14520 - protein, 18 aa, Artificial
  helical interface sequence
DFHDSNVKNLYDKVRLQL

SEQ ID NO: 14521 - protein, 6 aa, Artificial
  helical interface sequence
SEQLTS

SEQ ID NO: 14522 - protein, 21 aa, Artificial
  helical interface sequence
AQGALANIAVDKANLEIMTKR

SEQ ID NO: 14523 - protein, 5 aa, Artificial
  helical interface sequence
PAEFR

SEQ ID NO: 14524 - protein, 13 aa, Artificial
  helical interface sequence
KKMAPVMRRVWEQ

SEQ ID NO: 14525 - protein, 11 aa, Artificial
  helical interface sequence
NILKLKLYRSL

SEQ ID NO: 14526 - protein, 7 aa, Artificial
  helical interface sequence
IEEDFNA

SEQ ID NO: 14527 - protein, 5 aa, Artificial
  helical interface sequence
RDFLY

SEQ ID NO: 14528 - protein, 23 aa, Artificial
  helical interface sequence
YATAGAGAVATGAAVWPLINQMN

SEQ ID NO: 14529 - protein, 29 aa, Artificial
  helical interface sequence
GFMLRYLHANGASLFFIAVYLHIFRGLYY

SEQ ID NO: 14530 - protein, 6 aa, Artificial
  helical interface sequence
KGEELF

SEQ ID NO: 14531 - protein, 24 aa, Artificial
  helical interface sequence
EALTVAATEVRRIRDRAIQSDAQV

SEQ ID NO: 14532 - protein, 20 aa, Artificial
  helical interface sequence
QAQETQGQAAARAAAADLAA

SEQ ID NO: 14533 - protein, 17 aa, Artificial
  helical interface sequence
QVVVNKAAVMVHQLSKK

SEQ ID NO: 14534 - protein, 16 aa, Artificial
  helical interface sequence
VTESLKVKLQWASAFG

SEQ ID NO: 14535 - protein, 18 aa, Artificial
  helical interface sequence
PKRIRKAGSLRHRVEELE

SEQ ID NO: 14536 - protein, 13 aa, Artificial
  helical interface sequence
FRTRESTAKKIKA

SEQ ID NO: 14537 - protein, 11 aa, Artificial
  helical interface sequence
IKNLRRVAKEL

SEQ ID NO: 14538 - protein, 13 aa, Artificial
  helical interface sequence
PLDEIKRAFQLFD

SEQ ID NO: 14539 - protein, 9 aa, Artificial
  helical interface sequence
DDSKDTWKK

SEQ ID NO: 14540 - protein, 6 aa, Artificial
  helical interface sequence
QSRIVE

SEQ ID NO: 14541 - protein, 18 aa, Artificial
  helical interface sequence
KKKNVLHERMEQSILPLF

SEQ ID NO: 14542 - protein, 15 aa, Artificial
  helical interface sequence
PWSISSALALTYLAA

SEQ ID NO: 14543 - protein, 16 aa, Artificial
  helical interface sequence
IHDRKEFAKFEEERAR

SEQ ID NO: 14544 - protein, 7 aa, Artificial
  helical interface sequence
MYMRRKC

SEQ ID NO: 14545 - protein, 11 aa, Artificial
  helical interface sequence
YRHLLLEDQRI

SEQ ID NO: 14546 - protein, 22 aa, Artificial
  helical interface sequence
KKQYRHLLLEDQRIRGLLEKEL

SEQ ID NO: 14547 - protein, 11 aa, Artificial
  helical interface sequence
GTENLYFQSME

SEQ ID NO: 14548 - protein, 9 aa, Artificial
  helical interface sequence
SLESCLKFA

SEQ ID NO: 14549 - protein, 11 aa, Artificial
  helical interface sequence
VDDVLKFTFTG

SEQ ID NO: 14550 - protein, 13 aa, Artificial
  helical interface sequence
VHEKLRWTFNLYD

SEQ ID NO: 14551 - protein, 13 aa, Artificial
  helical interface sequence
VHEKLRWTFNLYD

SEQ ID NO: 14552 - protein, 8 aa, Artificial
  helical interface sequence
EASLKKVL

SEQ ID NO: 14553 - protein, 22 aa, Artificial
  helical interface sequence
TVQCWSETLAYDCALMNTALET

SEQ ID NO: 14554 - protein, 7 aa, Artificial
  helical interface sequence
SEQLTSG

SEQ ID NO: 14555 - protein, 16 aa, Artificial
  helical interface sequence
WRVRLAIIEYMPLLAG

SEQ ID NO: 14556 - protein, 14 aa, Artificial
  helical interface sequence
AVDTYCRHNYGVGE

SEQ ID NO: 14557 - protein, 15 aa, Artificial
  helical interface sequence
TNLLFVPFMSGAAYN

SEQ ID NO: 14558 - protein, 19 aa, Artificial
  helical interface sequence
TFDKYYRPRYEYLAKEAAA

SEQ ID NO: 14559 - protein, 8 aa, Artificial
  helical interface sequence
TCTVACKN

SEQ ID NO: 14560 - protein, 6 aa, Artificial
  helical interface sequence
HCVEAC

SEQ ID NO: 14561 - protein, 6 aa, Artificial
  helical interface sequence
HEILEM

SEQ ID NO: 14562 - protein, 19 aa, Artificial
  helical interface sequence
AQETQGQAAARAAAADLAA

SEQ ID NO: 14563 - protein, 20 aa, Artificial
  helical interface sequence
QAQETQGQAAARAAAADLAA

SEQ ID NO: 14564 - protein, 6 aa, Artificial
  helical interface sequence
CADCHM

SEQ ID NO: 14565 - protein, 13 aa, Artificial
  helical interface sequence
PKELVARIKAVMR

SEQ ID NO: 14566 - protein, 18 aa, Artificial
  helical interface sequence
LSDAYATFALMMSISDSL

SEQ ID NO: 14567 - protein, 12 aa, Artificial
  helical interface sequence
LATDMGTMQERI

SEQ ID NO: 14568 - protein, 8 aa, Artificial
  helical interface sequence
QDIIAILG

SEQ ID NO: 14569 - protein, 5 aa, Artificial
  helical interface sequence
LASVY

SEQ ID NO: 14570 - protein, 21 aa, Artificial
  helical interface sequence
WGRIVTLISFGAFVAKHLKSV

SEQ ID NO: 14571 - protein, 11 aa, Artificial
  helical interface sequence
INAAIERLLGS

SEQ ID NO: 14572 - protein, 6 aa, Artificial
  helical interface sequence
LDEKMK

SEQ ID NO: 14573 - protein, 8 aa, Artificial
  helical interface sequence
EPMEIFRN

SEQ ID NO: 14574 - protein, 17 aa, Artificial
  helical interface sequence
LGTEIANTLYRIFNNKS

SEQ ID NO: 14575 - protein, 10 aa, Artificial
  helical interface sequence
PEKVLDQLLK

SEQ ID NO: 14576 - protein, 13 aa, Artificial
  helical interface sequence
TITFADIIDELSD

SEQ ID NO: 14577 - protein, 10 aa, Artificial
  helical interface sequence
PEHCIEYVRM

SEQ ID NO: 14578 - protein, 9 aa, Artificial
  helical interface sequence
ENFEEAIKN

SEQ ID NO: 14579 - protein, 29 aa, Artificial
  helical interface sequence
PEYWDRNTQIFKTNTQTYRESLRNLRGYY

SEQ ID NO: 14580 - protein, 9 aa, Artificial
  helical interface sequence
PGRFAKLLL

SEQ ID NO: 14581 - protein, 11 aa, Artificial
  helical interface sequence
AMDVVYALKRQ

SEQ ID NO: 14582 - protein, 12 aa, Artificial
  helical interface sequence
SREIQTAVRLLL

SEQ ID NO: 14583 - protein, 9 aa, Artificial
  helical interface sequence
RTITTAYYR

SEQ ID NO: 14584 - protein, 17 aa, Artificial
  helical interface sequence
TAKLVSKAHRIFEEFVD

SEQ ID NO: 14585 - protein, 9 aa, Artificial
  helical interface sequence
DGQKEELIR

SEQ ID NO: 14586 - protein, 10 aa, Artificial
  helical interface sequence
YEEFVKKVMT

SEQ ID NO: 14587 - protein, 14 aa, Artificial
  helical interface sequence
LKTVFDEAIRAVLG

SEQ ID NO: 14588 - protein, 5 aa, Artificial
  helical interface sequence
TSLRR

SEQ ID NO: 14589 - protein, 9 aa, Artificial
  helical interface sequence
PRIQTFVNG

SEQ ID NO: 14590 - protein, 14 aa, Artificial
  helical interface sequence
WRVRLAIIEYMPLL

SEQ ID NO: 14591 - protein, 16 aa, Artificial
  helical interface sequence
EKDIAAYIKKEFDKKY

SEQ ID NO: 14592 - protein, 12 aa, Artificial
  helical interface sequence
DEEQLKLIFDIM

SEQ ID NO: 14593 - protein, 10 aa, Artificial
  helical interface sequence
KENIIAAAQA

SEQ ID NO: 14594 - protein, 8 aa, Artificial
  helical interface sequence
VVENIIIG

SEQ ID NO: 14595 - protein, 7 aa, Artificial
  helical interface sequence
GKTVRRS

SEQ ID NO: 14596 - protein, 7 aa, Artificial
  helical interface sequence
LVADLIR

SEQ ID NO: 14597 - protein, 11 aa, Artificial
  helical interface sequence
EELISQAQVVL

SEQ ID NO: 14598 - protein, 11 aa, Artificial
  helical interface sequence
VNLAVNNLLSR

SEQ ID NO: 14599 - protein, 29 aa, Artificial
  helical interface sequence
RRDFLYYATAGAGAVATGAAVWPLINQMN

SEQ ID NO: 14600 - protein, 7 aa, Artificial
  helical interface sequence
IEEDFNA

SEQ ID NO: 14601 - protein, 11 aa, Artificial
  helical interface sequence
FASVEHIMRNV

SEQ ID NO: 14602 - protein, 29 aa, Artificial
  helical interface sequence
RRDFLYYATAGAGAVATGAAVWPLINQMN

SEQ ID NO: 14603 - protein, 29 aa, Artificial
  helical interface sequence
RRDFLYYATAGAGAVATGAAVWPLINQMN

SEQ ID NO: 14604 - protein, 29 aa, Artificial
  helical interface sequence
RRDFLYYATAGAGAVATGAAVWPLINQMN

SEQ ID NO: 14605 - protein, 18 aa, Artificial
  helical interface sequence
PENFRLLGDILIIVLAAH

SEQ ID NO: 14606 - protein, 7 aa, Artificial
  helical interface sequence
DEQLKSG

SEQ ID NO: 14607 - protein, 14 aa, Artificial
  helical interface sequence
FLDLCAMLVCKLFS

SEQ ID NO: 14608 - protein, 14 aa, Artificial
  helical interface sequence
KEEMKMVWETQKIF

SEQ ID NO: 14609 - protein, 11 aa, Artificial
  helical interface sequence
PFQNFFKITLP

SEQ ID NO: 14610 - protein, 21 aa, Artificial
  helical interface sequence
FGLAAAIATLIFLLVGALAIV

SEQ ID NO: 14611 - protein, 7 aa, Artificial
  helical interface sequence
PWTQRFF

SEQ ID NO: 14612 - protein, 10 aa, Artificial
  helical interface sequence
PDRIAMLKYG

SEQ ID NO: 14613 - protein, 15 aa, Artificial
  helical interface sequence
PLTRTVEEIEDLFLG

SEQ ID NO: 14614 - protein, 14 aa, Artificial
  helical interface sequence
PVSISAALVMLSFG

SEQ ID NO: 14615 - protein, 16 aa, Artificial
  helical interface sequence
EAEMIALAGLLQMSQG

SEQ ID NO: 14616 - protein, 7 aa, Artificial
  helical interface sequence
PPCILNN

SEQ ID NO: 14617 - protein, 15 aa, Artificial
  helical interface sequence
FVSDIKQEAAYRAAN

SEQ ID NO: 14618 - protein, 9 aa, Artificial
  helical interface sequence
QAVLSLYAS

SEQ ID NO: 14619 - protein, 7 aa, Artificial
  helical interface sequence
TELFYKG

SEQ ID NO: 14620 - protein, 6 aa, Artificial
  helical interface sequence
AAFAQF

SEQ ID NO: 14621 - protein, 5 aa, Artificial
  helical interface sequence
LPNFF

SEQ ID NO: 14622 - protein, 5 aa, Artificial
  helical interface sequence
ASTME

SEQ ID NO: 14623 - protein, 10 aa, Artificial
  helical interface sequence
LNAAHQEALM

SEQ ID NO: 14624 - protein, 13 aa, Artificial
  helical interface sequence
RGLAVFISDIRNC

SEQ ID NO: 14625 - protein, 12 aa, Artificial
  helical interface sequence
AELAALKTYIAN

SEQ ID NO: 14626 - protein, 14 aa, Artificial
  helical interface sequence
GNKRLDAVNAITSN

SEQ ID NO: 14627 - protein, 10 aa, Artificial
  helical interface sequence
TTTRYHQEKN

SEQ ID NO: 14628 - protein, 14 aa, Artificial
  helical interface sequence
SNKRLDAVNAITGN

SEQ ID NO: 14629 - protein, 7 aa, Artificial
  helical interface sequence
KSYLDDF

SEQ ID NO: 14630 - protein, 10 aa, Artificial
  helical interface sequence
FVILLILIAN

SEQ ID NO: 14631 - protein, 6 aa, Artificial
  helical interface sequence
SEQLTS

SEQ ID NO: 14632 - protein, 7 aa, Artificial
  helical interface sequence
SEQLTSG

SEQ ID NO: 14633 - protein, 7 aa, Artificial
  helical interface sequence
DEQLKSG

SEQ ID NO: 14634 - protein, 12 aa, Artificial
  helical interface sequence
RIGRIVFRAAQK

SEQ ID NO: 14635 - protein, 10 aa, Artificial
  helical interface sequence
KTCLLISYTT

SEQ ID NO: 14636 - protein, 6 aa, Artificial
  helical interface sequence
SEQLTS

SEQ ID NO: 14637 - protein, 29 aa, Artificial
  helical interface sequence
FPEFLTMMARKMKDTDSEEEIREAFRVFD

SEQ ID NO: 14638 - protein, 22 aa, Artificial
  helical interface sequence
AQGALANIAVDKANLEIMTKRS

SEQ ID NO: 14639 - protein, 18 aa, Artificial
  helical interface sequence
PYAAQLAALDAAKKAMAY

SEQ ID NO: 14640 - protein, 15 aa, Artificial
  helical interface sequence
PTQLANAMKLVRQQN

SEQ ID NO: 14641 - protein, 13 aa, Artificial
  helical interface sequence
LDRAADIAVMANF

SEQ ID NO: 14642 - protein, 15 aa, Artificial
  helical interface sequence
TSTGKKVMASASSSS

SEQ ID NO: 14643 - protein, 5 aa, Artificial
  helical interface sequence
SLASV

SEQ ID NO: 14644 - protein, 20 aa, Artificial
  helical interface sequence
KVTAMKCFLLELQVISLESG

SEQ ID NO: 14645 - protein, 19 aa, Artificial
  helical interface sequence
ASIHDTVENLIILANNSLS

SEQ ID NO: 14646 - protein, 19 aa, Artificial
  helical interface sequence
ASIHDTVENLIILANNSLS

SEQ ID NO: 14647 - protein, 10 aa, Artificial
  helical interface sequence
RKWIKDTIVA

SEQ ID NO: 14648 - protein, 12 aa, Artificial
  helical interface sequence
SQGAKTYLERTL

SEQ ID NO: 14649 - protein, 18 aa, Artificial
  helical interface sequence
PSYIFEYLATVMYQRRSK

SEQ ID NO: 14650 - protein, 22 aa, Artificial
  helical interface sequence
TADAEILINTARIHAQNYLKTY

SEQ ID NO: 14651 - protein, 22 aa, Artificial
  helical interface sequence
NADSRILIEKARVEAQSHRLTL

SEQ ID NO: 14652 - protein, 12 aa, Artificial
  helical interface sequence
SQGAKTYLERTL

SEQ ID NO: 14653 - protein, 19 aa, Artificial
  helical interface sequence
VEDALYLGKRSILAAAHRD

SEQ ID NO: 14654 - protein, 13 aa, Artificial
  helical interface sequence
VGELFWKVKEEEG

SEQ ID NO: 14655 - protein, 13 aa, Artificial
  helical interface sequence
YSGFYTFSLLDHH

SEQ ID NO: 14656 - protein, 7 aa, Artificial
  helical interface sequence
SGVLHEV

SEQ ID NO: 14657 - protein, 12 aa, Artificial
  helical interface sequence
ISEAEHCLKELE

SEQ ID NO: 14658 - protein, 84 aa, Artificial; identical to SEQ ID NO: 14136
  helical interface sequence

SEQ ID NO: 14659 - protein, 5 aa, Artificial
  helical interface sequence
AFDLI

SEQ ID NO: 14660 - protein, 19 aa, Artificial
  helical interface sequence
GPEASQAQAMTFLIRDQKL

SEQ ID NO: 14661 - protein, 8 aa, Artificial
  helical interface sequence
ATCFVWFN

SEQ ID NO: 14662 - protein, 5 aa, Artificial
  helical interface sequence
GTMWY

SEQ ID NO: 14663 - protein, 18 aa, Artificial
  helical interface sequence
RTSLYLGLLLILVLALLF

SEQ ID NO: 14664 - protein, 14 aa, Artificial
  helical interface sequence
SRARIDARIDFESG

SEQ ID NO: 14665 - protein, 12 aa, Artificial
  helical interface sequence
SCHMRQATCFLG

SEQ ID NO: 14666 - protein, 12 aa, Artificial
  helical interface sequence
SCHMRQATCFLG

SEQ ID NO: 14667 - protein, 25 aa, Artificial
  helical interface sequence
WFCAFPYSLLIFVYDEVRKLIIRRR

SEQ ID NO: 14668 - protein, 6 aa, Artificial
  helical interface sequence
KSLAYQ

SEQ ID NO: 14669 - protein, 7 aa, Artificial
  helical interface sequence
GLFYSIF

SEQ ID NO: 14670 - protein, 21 aa, Artificial
  helical interface sequence
LREIQQTEEKYTDTLGSIQQH

SEQ ID NO: 14671 - protein, 16 aa, Artificial
  helical interface sequence
NLYGDILSDLNSGLSA

SEQ ID NO: 14672 - protein, 23 aa, Artificial
  helical interface sequence
ILENLRSKIQKLESDVSAQMEYC

SEQ ID NO: 14673 - protein, 26 aa, Artificial
  helical interface sequence
SRSLHFFLAAWPVVGVWFTALGISTM

SEQ ID NO: 14674 - protein, 21 aa, Artificial
  helical interface sequence
ETITYVFIFACIIALFFFAIF

SEQ ID NO: 14675 - protein, 7 aa, Artificial
  helical interface sequence
SEQLTSG

SEQ ID NO: 14676 - protein, 6 aa, Artificial
  helical interface sequence
KDEYER

SEQ ID NO: 14677 - protein, 6 aa, Artificial
  helical interface sequence
PLLDEL

SEQ ID NO: 14678 - protein, 14 aa, Artificial
  helical interface sequence
VLTKMKEIAEAYLG

SEQ ID NO: 14679 - protein, 13 aa, Artificial
  helical interface sequence
QGTLAERIRAGGA

SEQ ID NO: 14680 - protein, 6 aa, Artificial
  helical interface sequence
SEQLTS

SEQ ID NO: 14681 - protein, 18 aa, Artificial
  helical interface sequence
GGLINKKCYEMASHLRRS

SEQ ID NO: 14682 - protein, 6 aa, Artificial
  helical interface sequence
DDYRTG

SEQ ID NO: 14683 - protein, 9 aa, Artificial
  helical interface sequence
PVGPALGQH

SEQ ID NO: 14684 - protein, 9 aa, Artificial
  helical interface sequence
PRFLERHLA

SEQ ID NO: 14685 - protein, 16 aa, Artificial
  helical interface sequence
TSELIYAGLEAIQKRG

SEQ ID NO: 14686 - protein, 13 aa, Artificial
  helical interface sequence
ILNRKAIDFLLQR

SEQ ID NO: 14687 - protein, 23 aa, Artificial
  helical interface sequence
QNEEDAKLLYGMIFSLRSITQKL

SEQ ID NO: 14688 - protein, 14 aa, Artificial
  helical interface sequence
TERARQVLEHLLKE

SEQ ID NO: 14689 - protein, 11 aa, Artificial
  helical interface sequence
SFRITRGIEAV

SEQ ID NO: 14690 - protein, 18 aa, Artificial
  helical interface sequence
IDDMMFCAQGEWMRLCTS

SEQ ID NO: 14691 - protein, 6 aa, Artificial
  helical interface sequence
RSERKR

SEQ ID NO: 14692 - protein, 20 aa, Artificial
  helical interface sequence
EDESYARAYRIIRAHQTELT

SEQ ID NO: 14693 - protein, 5 aa, Artificial
  helical interface sequence
FRKSN

SEQ ID NO: 14694 - protein, 32 aa, Artificial; identical to SEQ ID NO: 6965
  helical interface sequence

SEQ ID NO: 14695 - protein, 8 aa, Artificial
  helical interface sequence
EIAEAYLG

SEQ ID NO: 14696 - protein, 14 aa, Artificial
  helical interface sequence
DGIIEGIADYGNSI

SEQ ID NO: 14697 - protein, 32 aa, Artificial; identical to SEQ ID NO: 4981
  helical interface sequence

SEQ ID NO: 14698 - protein, 9 aa, Artificial
  helical interface sequence
QAVLSLYAS

SEQ ID NO: 14699 - protein, 10 aa, Artificial
  helical interface sequence
SVWIGGSILA

SEQ ID NO: 14700 - protein, 9 aa, Artificial
  helical interface sequence
DHGQEALES

SEQ ID NO: 14701 - protein, 9 aa, Artificial
  helical interface sequence
YRLTQGVVK

SEQ ID NO: 14702 - protein, 25 aa, Artificial
  helical interface sequence
EEMTATCLRDLDYYLRLVTYGIVAG

SEQ ID NO: 14703 - protein, 12 aa, Artificial
  helical interface sequence
LDLLFMSLRNAC

SEQ ID NO: 14704 - protein, 16 aa, Artificial
  helical interface sequence
VADCGAEALARLLIVY

SEQ ID NO: 14705 - protein, 32 aa, Artificial
  helical interface sequence
EEGRKKFAKYTRRLTLLIGGFQAFFVSFSLAR

SEQ ID NO: 14706 - protein, 5 aa, Artificial
  helical interface sequence
PEIVT

SEQ ID NO: 14707 - protein, 16 aa, Artificial
  helical interface sequence
TELEDLIPEVEEFYKK

SEQ ID NO: 14708 - protein, 10 aa, Artificial
  helical interface sequence
YEELVRMVLS

SEQ ID NO: 14709 - protein, 31 aa, Artificial; identical to SEQ ID NO: 13678
  helical interface sequence

SEQ ID NO: 14710 - protein, 6 aa, Artificial
  helical interface sequence
REDCIS

SEQ ID NO: 14711 - protein, 9 aa, Artificial
  helical interface sequence
EGEQCSAAH

SEQ ID NO: 14712 - protein, 9 aa, Artificial
  helical interface sequence
MFSHLRRIG

SEQ ID NO: 14713 - protein, 9 aa, Artificial
  helical interface sequence
MFSHLRRIG

SEQ ID NO: 14714 - protein, 18 aa, Artificial
  helical interface sequence
KAVDWWALGVLIYEMAAG

SEQ ID NO: 14715 - protein, 10 aa, Artificial
  helical interface sequence
MLLQEMADEA

SEQ ID NO: 14716 - protein, 7 aa, Artificial
  helical interface sequence
TLDYVVH

SEQ ID NO: 14717 - protein, 5 aa, Artificial
  helical interface sequence
EHCSH

SEQ ID NO: 14718 - protein, 17 aa, Artificial
  helical interface sequence
FCTPGIVMSMYTLLRNQ

SEQ ID NO: 14719 - protein, 7 aa, Artificial
  helical interface sequence
AAMQASG

SEQ ID NO: 14720 - protein, 15 aa, Artificial
  helical interface sequence
SDVDLSKYITTIAGV

SEQ ID NO: 14721 - protein, 8 aa, Artificial
  helical interface sequence
EQLVIEFY

SEQ ID NO: 14722 - protein, 15 aa, Artificial
  helical interface sequence
AQQIEAARVAMVRHF

SEQ ID NO: 14723 - protein, 5 aa, Artificial
  helical interface sequence
KDFAE

SEQ ID NO: 14724 - protein, 12 aa, Artificial
  helical interface sequence
LGNWVCAAKFES

SEQ ID NO: 14725 - protein, 10 aa, Artificial
  helical interface sequence
TEMITTLKKI

SEQ ID NO: 14726 - protein, 11 aa, Artificial
  helical interface sequence
LGLMTEKLSQK

SEQ ID NO: 14727 - protein, 8 aa, Artificial
  helical interface sequence
AVAEVFTG

SEQ ID NO: 14728 - protein, 17 aa, Artificial
  helical interface sequence
PRDLFEYTLANQMLTAM

SEQ ID NO: 14729 - protein, 19 aa, Artificial
  helical interface sequence
PECQAAWQKLVRVVAHALA

SEQ ID NO: 14730 - protein, 10 aa, Artificial
  helical interface sequence
ENEFIAICTD

SEQ ID NO: 14731 - protein, 8 aa, Artificial
  helical interface sequence
SIGHFLQS

SEQ ID NO: 14732 - protein, 7 aa, Artificial
  helical interface sequence
IVDRFLA

SEQ ID NO: 14733 - protein, 22 aa, Artificial
  helical interface sequence
YPEYVSIQREKDAGAYSVKAAL

SEQ ID NO: 14734 - protein, 11 aa, Artificial
  helical interface sequence
VEPVIETAEID

SEQ ID NO: 14735 - protein, 11 aa, Artificial
  helical interface sequence
IDEIKQILRMT

SEQ ID NO: 14736 - protein, 7 aa, Artificial
  helical interface sequence
DEQLKSG

SEQ ID NO: 14737 - protein, 9 aa, Artificial
  helical interface sequence
HTLGNLIRA

SEQ ID NO: 14738 - protein, 12 aa, Artificial
  helical interface sequence
FQVANWLHFVNN

SEQ ID NO: 14739 - protein, 11 aa, Artificial
  helical interface sequence
REWVLKIAKLA

SEQ ID NO: 14740 - protein, 15 aa, Artificial
  helical interface sequence
PEVKRRIMLGTFALS

SEQ ID NO: 14741 - protein, 12 aa, Artificial
  helical interface sequence
RARLEAQIYRLT

SEQ ID NO: 14742 - protein, 11 aa, Artificial
  helical interface sequence
EDKIIQVMKEF

SEQ ID NO: 14743 - protein, 29 aa, Artificial
  helical interface sequence
NQQWEKLQHMFQVYRVSFTRDIQELVKMM

SEQ ID NO: 14744 - protein, 7 aa, Artificial
  helical interface sequence
SSDFEAR

SEQ ID NO: 14745 - protein, 11 aa, Artificial
  helical interface sequence
VVEWLGWFEDQ

SEQ ID NO: 14746 - protein, 10 aa, Artificial
  helical interface sequence
KRWPSAARRL

SEQ ID NO: 14747 - protein, 6 aa, Artificial
  helical interface sequence
INEVIH

SEQ ID NO: 14748 - protein, 10 aa, Artificial
  helical interface sequence
MRNTEIWDNL

SEQ ID NO: 14749 - protein, 12 aa, Artificial
  helical interface sequence
PHYDRGEVAGML

SEQ ID NO: 14750 - protein, 24 aa, Artificial
  helical interface sequence
VLYKKESVQGVFKKLFVDILDQLE

SEQ ID NO: 14751 - protein, 16 aa, Artificial
  helical interface sequence
PENFRLLGNMIVIVLG

SEQ ID NO: 14752 - protein, 7 aa, Artificial
  helical interface sequence
LSALTNI

SEQ ID NO: 14753 - protein, 8 aa, Artificial
  helical interface sequence
KQTAAKLL

SEQ ID NO: 14754 - protein, 6 aa, Artificial
  helical interface sequence
DEQLKS

SEQ ID NO: 14755 - protein, 16 aa, Artificial
  helical interface sequence
YYERYVIGVATLMVEK

SEQ ID NO: 14756 - protein, 17 aa, Artificial
  helical interface sequence
ELLDLVEMEVRDLLNQY

SEQ ID NO: 14757 - protein, 12 aa, Artificial
  helical interface sequence
SREIQTAVRLLL

SEQ ID NO: 14758 - protein, 11 aa, Artificial
  helical interface sequence
AMDVVYALKRQ

SEQ ID NO: 14759 - protein, 9 aa, Artificial
  helical interface sequence
RPDAEYWNS

SEQ ID NO: 14760 - protein, 13 aa, Artificial
  helical interface sequence
HTSIRRGFQVYKQ

SEQ ID NO: 14761 - protein, 6 aa, Artificial
  helical interface sequence
PSKFTQ

SEQ ID NO: 14762 - protein, 5 aa, Artificial
  helical interface sequence
TEQLA

SEQ ID NO: 14763 - protein, 36 aa, Artificial; identical to SEQ ID NO: 312
  helical interface sequence

SEQ ID NO: 14764 - protein, 8 aa, Artificial
  helical interface sequence
AEIRHVLV

SEQ ID NO: 14765 - protein, 5 aa, Artificial
  helical interface sequence
EEFGR

SEQ ID NO: 14766 - protein, 5 aa, Artificial
  helical interface sequence
EEFGR

SEQ ID NO: 14767 - protein, 19 aa, Artificial
  helical interface sequence
DKEYQIMRNASMAVLREIG

SEQ ID NO: 14768 - protein, 7 aa, Artificial
  helical interface sequence
FKEICAV

SEQ ID NO: 14769 - protein, 7 aa, Artificial
  helical interface sequence
FKEICAV

SEQ ID NO: 14770 - protein, 15 aa, Artificial
  helical interface sequence
PISVAAAAIYMASQA

SEQ ID NO: 14771 - protein, 6 aa, Artificial
  helical interface sequence
SEQLTS

SEQ ID NO: 14772 - protein, 5 aa, Artificial
  helical interface sequence
ARPKY

SEQ ID NO: 14773 - protein, 11 aa, Artificial
  helical interface sequence
VMEAALRFAYE

SEQ ID NO: 14774 - protein, 21 aa, Artificial
  helical interface sequence
ITTTMTDSFLTGQILLQDLKA

SEQ ID NO: 14775 - protein, 6 aa, Artificial
  helical interface sequence
PIRELV

SEQ ID NO: 14776 - protein, 20 aa, Artificial
  helical interface sequence
EELLQVVQRIHELRTLAGYR

SEQ ID NO: 14777 - protein, 20 aa, Artificial
  helical interface sequence
EELLQVVQRIHELRTLAGYR

SEQ ID NO: 14778 - protein, 6 aa, Artificial
  helical interface sequence
PIRELV

SEQ ID NO: 14779 - protein, 8 aa, Artificial
  helical interface sequence
AIRELAAW

SEQ ID NO: 14780 - protein, 8 aa, Artificial
  helical interface sequence
AIRELAAW

SEQ ID NO: 14781 - protein, 11 aa, Artificial
  helical interface sequence
PKELDKLMLHY

SEQ ID NO: 14782 - protein, 14 aa, Artificial
  helical interface sequence
YKAAVDLSHFLKEK

SEQ ID NO: 14783 - protein, 5 aa, Artificial
  helical interface sequence
EHDFF

SEQ ID NO: 14784 - protein, 15 aa, Artificial
  helical interface sequence
IFPHLDWTAAFSIRY

SEQ ID NO: 14785 - protein, 17 aa, Artificial
  helical interface sequence
HLSWAFAAAIFFYLVLG

SEQ ID NO: 14786 - protein, 13 aa, Artificial
  helical interface sequence
GSDLQALRTFISD

SEQ ID NO: 14787 - protein, 12 aa, Artificial
  helical interface sequence
TATANCAKKIVS

SEQ ID NO: 14788 - protein, 7 aa, Artificial
  helical interface sequence
AEMLTNN

SEQ ID NO: 14789 - protein, 6 aa, Artificial
  helical interface sequence
FWIYLM

SEQ ID NO: 14790 - protein, 19 aa, Artificial
  helical interface sequence
PVNFKLLSHCLLVTLACHH

SEQ ID NO: 14791 - protein, 7 aa, Artificial
  helical interface sequence
KQVKSVA

SEQ ID NO: 14792 - protein, 7 aa, Artificial
  helical interface sequence
SEQLTSG

SEQ ID NO: 14793 - protein, 17 aa, Artificial
  helical interface sequence
TKLLVSEVAKIMQEATQ

SEQ ID NO: 14794 - protein, 23 aa, Artificial
  helical interface sequence
AADTEAVTQLIGSNIELHSLYTS

SEQ ID NO: 14795 - protein, 18 aa, Artificial
  helical interface sequence
VEEVIKLVRDSFTSATER

SEQ ID NO: 14796 - protein, 14 aa, Artificial
  helical interface sequence
AAILKKVIQWCTHH

SEQ ID NO: 14797 - protein, 10 aa, Artificial
  helical interface sequence
DELLLGIFSC

SEQ ID NO: 14798 - protein, 16 aa, Artificial
  helical interface sequence
KGLLDVTCKTVANMIK

SEQ ID NO: 14799 - protein, 15 aa, Artificial
  helical interface sequence
QGTLFELILAANYLD

SEQ ID NO: 14800 - protein, 16 aa, Artificial
  helical interface sequence
KGLLDVTCKTVANMIK

SEQ ID NO: 14801 - protein, 20 aa, Artificial
  helical interface sequence
PENFKLLGNVLVVVLARNFG

SEQ ID NO: 14802 - protein, 15 aa, Artificial
  helical interface sequence
LSKQAQAYRQMSLLL

SEQ ID NO: 14803 - protein, 14 aa, Artificial
  helical interface sequence
FGAHMANPLLRKVV

SEQ ID NO: 14804 - protein, 22 aa, Artificial
  helical interface sequence
AADTQAIADIVQYHLELYTSQY

SEQ ID NO: 14805 - protein, 22 aa, Artificial
  helical interface sequence
AADTQAIADIVQYHLELYTSQY

SEQ ID NO: 14806 - protein, 19 aa, Artificial
  helical interface sequence
VEDALYLGKRSILAAAHRD

SEQ ID NO: 14807 - protein, 15 aa, Artificial
  helical interface sequence
VAAASKILSNLVYQY

SEQ ID NO: 14808 - protein, 15 aa, Artificial
  helical interface sequence
VVSALQMLKQHLFKY

SEQ ID NO: 14809 - protein, 7 aa, Artificial
  helical interface sequence
EKDIVFG

SEQ ID NO: 14810 - protein, 8 aa, Artificial
  helical interface sequence
YEARIFTF

SEQ ID NO: 14811 - protein, 8 aa, Artificial
  helical interface sequence
YEARIFTF

SEQ ID NO: 14812 - protein, 11 aa, Artificial
  helical interface sequence
PSVAIARHVAG

SEQ ID NO: 14813 - protein, 19 aa, Artificial
  helical interface sequence
PDTHCAVDKLLSAICQELS

SEQ ID NO: 14814 - protein, 14 aa, Artificial
  helical interface sequence
SNKRLDVVNRITSN

SEQ ID NO: 14815 - protein, 14 aa, Artificial
  helical interface sequence
SNKRLDVVNRITSN

SEQ ID NO: 14816 - protein, 8 aa, Artificial
  helical interface sequence
AFTKVVSQ

SEQ ID NO: 14817 - protein, 14 aa, Artificial
  helical interface sequence
SNKRLDVVNRITSN

SEQ ID NO: 14818 - protein, 25 aa, Artificial
  helical interface sequence
PTSVARQRLREDHSQLQAECERLRG

SEQ ID NO: 14819 - protein, 14 aa, Artificial
  helical interface sequence
KIGRKLLEKVIECS

SEQ ID NO: 14820 - protein, 19 aa, Artificial
  helical interface sequence
DDKMAQDTYTFLVKWFERF

SEQ ID NO: 14821 - protein, 17 aa, Artificial
  helical interface sequence
PQQFQLILENIANKYIQ

SEQ ID NO: 14822 - protein, 6 aa, Artificial
  helical interface sequence
SEQLTS

SEQ ID NO: 14823 - protein, 10 aa, Artificial
  helical interface sequence
GCQVACKQWH

SEQ ID NO: 14824 - protein, 7 aa, Artificial
  helical interface sequence
CMAEVIG

SEQ ID NO: 14825 - protein, 6 aa, Artificial
  helical interface sequence
ERDIVF

SEQ ID NO: 14826 - protein, 13 aa, Artificial
  helical interface sequence
VKDVQLHLERQWN

SEQ ID NO: 14827 - protein, 5 aa, Artificial
  helical interface sequence
PKELN

SEQ ID NO: 14828 - protein, 5 aa, Artificial
  helical interface sequence
PKELN

SEQ ID NO: 14829 - protein, 15 aa, Artificial
  helical interface sequence
GVPSSALREICLLKE

SEQ ID NO: 14830 - protein, 19 aa, Artificial
  helical interface sequence
DHELQAVLLTCLYLSYSYM

SEQ ID NO: 14831 - protein, 20 aa, Artificial
  helical interface sequence
DHELQAVLLTCLYLSYSYMG

SEQ ID NO: 14832 - protein, 15 aa, Artificial
  helical interface sequence
DVMYTTLLIELCKLQ

SEQ ID NO: 14833 - protein, 11 aa, Artificial
  helical interface sequence
FSHSFSALAKF

SEQ ID NO: 14834 - protein, 18 aa, Artificial
  helical interface sequence
PAVHANLNKFLANDSTVL

SEQ ID NO: 14835 - protein, 17 aa, Artificial
  helical interface sequence
FEEATAEAYRYADLLAK

SEQ ID NO: 14836 - protein, 12 aa, Artificial
  helical interface sequence
KETWETWWTEYW

SEQ ID NO: 14837 - protein, 18 aa, Artificial
  helical interface sequence
RHLLLEDQRIRGLLEKEL

SEQ ID NO: 14838 - protein, 16 aa, Artificial
  helical interface sequence
AEEYGAETLERMFTAY

SEQ ID NO: 14839 - protein, 22 aa, Artificial
  helical interface sequence
AQGALANIAVNKANLDVMKERS

SEQ ID NO: 14840 - protein, 8 aa, Artificial
  helical interface sequence
HADYLLRT

SEQ ID NO: 14841 - protein, 12 aa, Artificial
  helical interface sequence
TRAIPELTKLLN

SEQ ID NO: 14842 - protein, 18 aa, Artificial
  helical interface sequence
DSVLFYAITTLHNLLLHQ

SEQ ID NO: 14843 - protein, 8 aa, Artificial
  helical interface sequence
LRELAHKG

SEQ ID NO: 14844 - protein, 13 aa, Artificial
  helical interface sequence
QVARVAAGLQIKN

SEQ ID NO: 14845 - protein, 11 aa, Artificial
  helical interface sequence
AREIQTAVRLI

SEQ ID NO: 14846 - protein, 21 aa, Artificial
  helical interface sequence
NAPGAAANRVALEACTQARNE

SEQ ID NO: 14847 - protein, 23 aa, Artificial
  helical interface sequence
TSDANVLTNELRLIAQRYLLQYQ

SEQ ID NO: 14848 - protein, 19 aa, Artificial
  helical interface sequence
VEQAYDLARRAIYQATYRD

SEQ ID NO: 14849 - protein, 22 aa, Artificial
  helical interface sequence
HGDCLTLTKIIEARLKMYKHSN

SEQ ID NO: 14850 - protein, 19 aa, Artificial
  helical interface sequence
VEQAYDLARRAIYQATYRD

SEQ ID NO: 14851 - protein, 11 aa, Artificial
  helical interface sequence
KPFLLKKMEEK

SEQ ID NO: 14852 - protein, 5 aa, Artificial
  helical interface sequence
WTDLL

SEQ ID NO: 14853 - protein, 10 aa, Artificial
  helical interface sequence
EATELELGMR

SEQ ID NO: 14854 - protein, 16 aa, Artificial
  helical interface sequence
HAVARNFRRAAELIAI

SEQ ID NO: 14855 - protein, 10 aa, Artificial
  helical interface sequence
GLDIVGALSR

SEQ ID NO: 14856 - protein, 15 aa, Artificial
  helical interface sequence
EEQKNEFKAAFDIFV

SEQ ID NO: 14857 - protein, 22 aa, Artificial
  helical interface sequence
AADTQAIADIVQYHLELYTSQY

SEQ ID NO: 14858 - protein, 22 aa, Artificial
  helical interface sequence
IPDARNAALRAKAEAAEFRYKY

SEQ ID NO: 14859 - protein, 22 aa, Artificial
  helical interface sequence
IPDGRHLVNRGREEAASFKKLY

SEQ ID NO: 14860 - protein, 19 aa, Artificial
  helical interface sequence
VQVAEEAIVNAMRVLYYRD

SEQ ID NO: 14861 - protein, 15 aa, Artificial
  helical interface sequence
TETAASVFKELCYEN

SEQ ID NO: 14862 - protein, 11 aa, Artificial
  helical interface sequence
FDLLEDIESKI

SEQ ID NO: 14863 - protein, 6 aa, Artificial
  helical interface sequence
SEQLTS

SEQ ID NO: 14864 - protein, 19 aa, Artificial
  helical interface sequence
PESLRSKVDEAVAVLQAHQ

SEQ ID NO: 14865 - protein, 9 aa, Artificial
  helical interface sequence
VAGKAVMKA

SEQ ID NO: 14866 - protein, 9 aa, Artificial
  helical interface sequence
FLQMLKMYF

SEQ ID NO: 14867 - protein, 7 aa, Artificial
  helical interface sequence
LYGCSDP

SEQ ID NO: 14868 - protein, 10 aa, Artificial
  helical interface sequence
IREVAVLRHL

SEQ ID NO: 14869 - protein, 15 aa, Artificial
  helical interface sequence
INVVTCAAGILSNLT

SEQ ID NO: 14870 - protein, 11 aa, Artificial
  helical interface sequence
TDVSLWVTKAL

SEQ ID NO: 14871 - protein, 13 aa, Artificial
  helical interface sequence
PEAVLAAVRRAEG

SEQ ID NO: 14872 - protein, 23 aa, Artificial
  helical interface sequence
PPVQAAYQKVVAGVANALAHKYH

SEQ ID NO: 14873 - protein, 16 aa, Artificial
  helical interface sequence
PVNFKLLSHCLLVTLA

SEQ ID NO: 14874 - protein, 19 aa, Artificial
  helical interface sequence
PENFRLLGNVLVCVLAHHF

SEQ ID NO: 14875 - protein, 19 aa, Artificial
  helical interface sequence
PENFRLLGNVLVCVLAHHF

SEQ ID NO: 14876 - protein, 8 aa, Artificial
  helical interface sequence
PLHLAVEA

SEQ ID NO: 14877 - protein, 10 aa, Artificial
  helical interface sequence
KILHRLLQEG

SEQ ID NO: 14878 - protein, 5 aa, Artificial
  helical interface sequence
EWAQG

SEQ ID NO: 14879 - protein, 8 aa, Artificial
  helical interface sequence
NQEQTSLY

SEQ ID NO: 14880 - protein, 21 aa, Artificial
  helical interface sequence
PAAAIQQGKVESSKDFLIATL

SEQ ID NO: 14881 - protein, 21 aa, Artificial
  helical interface sequence
PAAAIQQGKVESSKDFLIATL

SEQ ID NO: 14882 - protein, 26 aa, Artificial
  helical interface sequence
TDLLYTIELGHGLNVAECMAHSAMAR

SEQ ID NO: 14883 - protein, 21 aa, Artificial
  helical interface sequence
PAAAIQQGKVESSKDFLIATL

SEQ ID NO: 14884 - protein, 13 aa, Artificial
  helical interface sequence
AVDTYCRHNYGVG

SEQ ID NO: 14885 - protein, 13 aa, Artificial
  helical interface sequence
LSSFILKPMQRVT

SEQ ID NO: 14886 - protein, 13 aa, Artificial
  helical interface sequence
LSSFILKPMQRVT

SEQ ID NO: 14887 - protein, 10 aa, Artificial
  helical interface sequence
PQAVLAFVAL

SEQ ID NO: 14888 - protein, 14 aa, Artificial
  helical interface sequence
GELRVRAATTIAAN

SEQ ID NO: 14889 - protein, 29 aa, Artificial
  helical interface sequence
PQMGRILHPFFGIAIFVALMFMFVRFVHH

SEQ ID NO: 14890 - protein, 11 aa, Artificial
  helical interface sequence
AMDVVYALKRQ

SEQ ID NO: 14891 - protein, 7 aa, Artificial
  helical interface sequence
EELNKLL

SEQ ID NO: 14892 - protein, 23 aa, Artificial
  helical interface sequence
EEGKALVHHYEECAERVKIQQQQ

SEQ ID NO: 14893 - protein, 7 aa, Artificial
  helical interface sequence
IYFLYEG

SEQ ID NO: 14894 - protein, 5 aa, Artificial
  helical interface sequence
WVDWW

SEQ ID NO: 14895 - protein, 5 aa, Artificial
  helical interface sequence
ERKYR

SEQ ID NO: 14896 - protein, 8 aa, Artificial
  helical interface sequence
KEDFRYRS

SEQ ID NO: 14897 - protein, 7 aa, Artificial
  helical interface sequence
MQQVENG

SEQ ID NO: 14898 - protein, 6 aa, Artificial
  helical interface sequence
PLSAHR

SEQ ID NO: 14899 - protein, 5 aa, Artificial
  helical interface sequence
IYNRI

SEQ ID NO: 14900 - protein, 12 aa, Artificial
  helical interface sequence
ATLWNCRREVLQ

SEQ ID NO: 14901 - protein, 13 aa, Artificial
  helical interface sequence
RIIHLQRRINMQL

SEQ ID NO: 14902 - protein, 10 aa, Artificial
  helical interface sequence
QESKLIILAS

SEQ ID NO: 14903 - protein, 28 aa, Artificial
  helical interface sequence
ESIQKKCEEVIAKYKPEWEAVVAKYRPR

SEQ ID NO: 14904 - protein, 6 aa, Artificial
  helical interface sequence
CMAEVI

SEQ ID NO: 14905 - protein, 9 aa, Artificial
  helical interface sequence
KEYQELNFQ

SEQ ID NO: 14906 - protein, 6 aa, Artificial
  helical interface sequence
CMAEVI

SEQ ID NO: 14907 - protein, 8 aa, Artificial
  helical interface sequence
KEYQELNF

SEQ ID NO: 14908 - protein, 11 aa, Artificial
  helical interface sequence
EMLAEIITNQI

SEQ ID NO: 14909 - protein, 9 aa, Artificial
  helical interface sequence
PVLYQHILW

SEQ ID NO: 14910 - protein, 28 aa, Artificial
  helical interface sequence
ADRRKAATMRERRRLSKVNEAFETLKRS

SEQ ID NO: 14911 - protein, 8 aa, Artificial
  helical interface sequence
FEEFCAVV

SEQ ID NO: 14912 - protein, 15 aa, Artificial
  helical interface sequence
KYEAEAIHIEFRQLY

SEQ ID NO: 14913 - protein, 18 aa, Artificial
  helical interface sequence
SIWVANHYRWIVWKLAAM

SEQ ID NO: 14914 - protein, 8 aa, Artificial
  helical interface sequence
SLYLTKSS

SEQ ID NO: 14915 - protein, 7 aa, Artificial
  helical interface sequence
LRAELEK

SEQ ID NO: 14916 - protein, 30 aa, Artificial; identical to SEQ ID NO: 9329
  helical interface sequence

SEQ ID NO: 14917 - protein, 15 aa, Artificial
  helical interface sequence
NGPLQWLDKVLTQMG

SEQ ID NO: 14918 - protein, 12 aa, Artificial
  helical interface sequence
DTRDAWVNKIAH

SEQ ID NO: 14919 - protein, 11 aa, Artificial
  helical interface sequence
QEGRNLIQACL

SEQ ID NO: 14920 - protein, 10 aa, Artificial
  helical interface sequence
WNESAFSVHA

SEQ ID NO: 14921 - protein, 20 aa, Artificial
  helical interface sequence
GIRLLAQVVQKIGKEALVIW

SEQ ID NO: 14922 - protein, 22 aa, Artificial
  helical interface sequence
PQGGLQNIAVVKHNLGVLTKRS

SEQ ID NO: 14923 - protein, 7 aa, Artificial
  helical interface sequence
ATLMQAL

SEQ ID NO: 14924 - protein, 9 aa, Artificial
  helical interface sequence
EIKNMWAAF

SEQ ID NO: 14925 - protein, 11 aa, Artificial
  helical interface sequence
NAEINKILGNP

SEQ ID NO: 14926 - protein, 7 aa, Artificial
  helical interface sequence
DEQLKSG

SEQ ID NO: 14927 - protein, 11 aa, Artificial
  helical interface sequence
VGDLRYMLTGL

SEQ ID NO: 14928 - protein, 5 aa, Artificial
  helical interface sequence
SKLLN

SEQ ID NO: 14929 - protein, 15 aa, Artificial
  helical interface sequence
RLTIAFFALSGLDML

SEQ ID NO: 14930 - protein, 6 aa, Artificial
  helical interface sequence
IQLLQK

SEQ ID NO: 14931 - protein, 11 aa, Artificial
  helical interface sequence
LKSLLQWVTSR

SEQ ID NO: 14932 - protein, 17 aa, Artificial
  helical interface sequence
VQELCRVLLDNVENKMK

SEQ ID NO: 14933 - protein, 15 aa, Artificial
  helical interface sequence
IETVGAEIADHVMDD

SEQ ID NO: 14934 - protein, 28 aa, Artificial
  helical interface sequence
LALRLMLQLVIVVALVVYVIYGFVVVWG

SEQ ID NO: 14935 - protein, 7 aa, Artificial
  helical interface sequence
KAEIANK

SEQ ID NO: 14936 - protein, 6 aa, Artificial
  helical interface sequence
TDTYLS

SEQ ID NO: 14937 - protein, 11 aa, Artificial
  helical interface sequence
ADFLLEQESKR

SEQ ID NO: 14938 - protein, 7 aa, Artificial
  helical interface sequence
REDFENA

SEQ ID NO: 14939 - protein, 6 aa, Artificial
  helical interface sequence
AEEEES

SEQ ID NO: 14940 - protein, 5 aa, Artificial
  helical interface sequence
SEELE

SEQ ID NO: 14941 - protein, 10 aa, Artificial
  helical interface sequence
SAIPEGQFMD

SEQ ID NO: 14942 - protein, 16 aa, Artificial
  helical interface sequence
AIVVGRILTEVIKKEA

SEQ ID NO: 14943 - protein, 14 aa, Artificial
  helical interface sequence
VDSLGYASSLASKT

SEQ ID NO: 14944 - protein, 30 aa, Artificial; identical to SEQ ID NO: 9329
  helical interface sequence

SEQ ID NO: 14945 - protein, 20 aa, Artificial
  helical interface sequence
TRNCWQNYLDFHRCEKAMTA

SEQ ID NO: 14946 - protein, 8 aa, Artificial
  helical interface sequence
SSLDIVLH

SEQ ID NO: 14947 - protein, 30 aa, Artificial
  helical interface sequence
KCTLSISVLLAQTIFLFLIAQKVPETSLNV

SEQ ID NO: 14948 - protein, 10 aa, Artificial
  helical interface sequence
EQDLTKLLLE

SEQ ID NO: 14949 - protein, 5 aa, Artificial
  helical interface sequence
PGRTL

SEQ ID NO: 14950 - protein, 9 aa, Artificial
  helical interface sequence
KEQLSALMD

SEQ ID NO: 14951 - protein, 8 aa, Artificial
  helical interface sequence
YEEIAAIM

SEQ ID NO: 14952 - protein, 18 aa, Artificial
  helical interface sequence
LTELDNLGHFLKGSSAAL

SEQ ID NO: 14953 - protein, 12 aa, Artificial
  helical interface sequence
AFAKVVAQADAR

SEQ ID NO: 14954 - protein, 13 aa, Artificial
  helical interface sequence
IWTHLDWVSNTGY

SEQ ID NO: 14955 - protein, 14 aa, Artificial
  helical interface sequence
MEGIHRWAIWMAVL

SEQ ID NO: 14956 - protein, 6 aa, Artificial
  helical interface sequence
KFLDRF

SEQ ID NO: 14957 - protein, 7 aa, Artificial
  helical interface sequence
FTDYLRG

SEQ ID NO: 14958 - protein, 10 aa, Artificial
  helical interface sequence
LSQIKRLLSE

SEQ ID NO: 14959 - protein, 7 aa, Artificial
  helical interface sequence
SEQLTSG

SEQ ID NO: 14960 - protein, 6 aa, Artificial
  helical interface sequence
SEQLTS

SEQ ID NO: 14961 - protein, 5 aa, Artificial
  helical interface sequence
SRVVT

SEQ ID NO: 14962 - protein, 13 aa, Artificial
  helical interface sequence
AFVMLTGAVAWMK

SEQ ID NO: 14963 - protein, 7 aa, Artificial
  helical interface sequence
AAFTQNQ

SEQ ID NO: 14964 - protein, 6 aa, Artificial
  helical interface sequence
PWTQRF

SEQ ID NO: 14965 - protein, 12 aa, Artificial
  helical interface sequence
AAELRHVMTNLG

SEQ ID NO: 14966 - protein, 11 aa, Artificial
  helical interface sequence
EAELQDMINEV

SEQ ID NO: 14967 - protein, 15 aa, Artificial
  helical interface sequence
DEQIAEFKEAFSLFD

SEQ ID NO: 14968 - protein, 9 aa, Artificial
  helical interface sequence
VAGKAVMKA

SEQ ID NO: 14969 - protein, 18 aa, Artificial
  helical interface sequence
AYVIEDLLHFCRCMYSMM

SEQ ID NO: 14970 - protein, 5 aa, Artificial
  helical interface sequence
STCLY

SEQ ID NO: 14971 - protein, 5 aa, Artificial
  helical interface sequence
EIAKL

SEQ ID NO: 14972 - protein, 7 aa, Artificial
  helical interface sequence
VKKFLER

SEQ ID NO: 14973 - protein, 19 aa, Artificial
  helical interface sequence
AQKIDRMMEAFAQRYCLCN

SEQ ID NO: 14974 - protein, 14 aa, Artificial
  helical interface sequence
AKNYGRAVYECLRG

SEQ ID NO: 14975 - protein, 16 aa, Artificial
  helical interface sequence
VKIIKSVETAAAARLC

SEQ ID NO: 14976 - protein, 23 aa, Artificial
  helical interface sequence
AGDTVQFAEYIQANIQLYSIRED

SEQ ID NO: 14977 - protein, 12 aa, Artificial
  helical interface sequence
SEGAQAELLNEW

SEQ ID NO: 14978 - protein, 15 aa, Artificial
  helical interface sequence
TETAASVFKELCYEN

SEQ ID NO: 14979 - protein, 6 aa, Artificial
  helical interface sequence
WDFAKD

SEQ ID NO: 14980 - protein, 22 aa, Artificial
  helical interface sequence
TADAEILINTARIHAQNYLKTY

SEQ ID NO: 14981 - protein, 15 aa, Artificial
  helical interface sequence
PETFTQLVSSSLYER

SEQ ID NO: 14982 - protein, 22 aa, Artificial
  helical interface sequence
IPDGRHLVNRGREEAASFKKLY

SEQ ID NO: 14983 - protein, 7 aa, Artificial
  helical interface sequence
DEQLKSG

SEQ ID NO: 14984 - protein, 20 aa, Artificial
  helical interface sequence
DEQKRALSAGLLRVISEATG

SEQ ID NO: 14985 - protein, 7 aa, Artificial
  helical interface sequence
PDEIKQS

SEQ ID NO: 14986 - protein, 11 aa, Artificial
  helical interface sequence
INRANLGMEVM

SEQ ID NO: 14987 - protein, 5 aa, Artificial
  helical interface sequence
TALVE

SEQ ID NO: 14988 - protein, 8 aa, Artificial
  helical interface sequence
RKLAVNMV

SEQ ID NO: 14989 - protein, 9 aa, Artificial
  helical interface sequence
TDLLPNLRR

SEQ ID NO: 14990 - protein, 16 aa, Artificial
  helical interface sequence
MEGTGLMLMANLFKTS

SEQ ID NO: 14991 - protein, 22 aa, Artificial
  helical interface sequence
AQGALANIAVDKANLEIMTKRS

SEQ ID NO: 14992 - protein, 21 aa, Artificial
  helical interface sequence
DSQIEKERDVILQELQENDTS

SEQ ID NO: 14993 - protein, 6 aa, Artificial
  helical interface sequence
ERELLE

SEQ ID NO: 14994 - protein, 11 aa, Artificial
  helical interface sequence
ANIILKELTFS

SEQ ID NO: 14995 - protein, 14 aa, Artificial
  helical interface sequence
EDRKRYLMTLLDDI

SEQ ID NO: 14996 - protein, 9 aa, Artificial
  helical interface sequence
NCRLECASI

SEQ ID NO: 14997 - protein, 6 aa, Artificial
  helical interface sequence
HTARLV

SEQ ID NO: 14998 - protein, 32 aa, Artificial; identical to SEQ ID NO: 3013
  helical interface sequence

SEQ ID NO: 14999 - protein, 9 aa, Artificial
  helical interface sequence
PTAYSYTSH

SEQ ID NO: 15000 - protein, 10 aa, Artificial
  helical interface sequence
VNTGQISIRH

SEQ ID NO: 15001 - protein, 16 aa, Artificial
  helical interface sequence
AGGLDALGHARRTIRR

SEQ ID NO: 15002 - protein, 31 aa, Artificial; identical to SEQ ID NO: 5073
  helical interface sequence

SEQ ID NO: 15003 - protein, 24 aa, Artificial
  helical interface sequence
IDSQIQYWQLIRWENAIFFAAREH

SEQ ID NO: 15004 - protein, 5 aa, Artificial
  helical interface sequence
DGRLA

SEQ ID NO: 15005 - protein, 6 aa, Artificial
  helical interface sequence
WAETMG

SEQ ID NO: 15006 - protein, 6 aa, Artificial
  helical interface sequence
WAETMG

SEQ ID NO: 15007 - protein, 13 aa, Artificial
  helical interface sequence
TSEVLKYTLFQIF

SEQ ID NO: 15008 - protein, 8 aa, Artificial
  helical interface sequence
VLVAIYNN

SEQ ID NO: 15009 - protein, 6 aa, Artificial
  helical interface sequence
SEQLTS

SEQ ID NO: 15010 - protein, 7 aa, Artificial
  helical interface sequence
PVDYLTS

SEQ ID NO: 15011 - protein, 28 aa, Artificial
  helical interface sequence
DTWAKIHFAIMFVGVNMTFFPQHFLGLS

SEQ ID NO: 15012 - protein, 25 aa, Artificial
  helical interface sequence
LLARRLRFHIVGAFMVSLGFATFYK

SEQ ID NO: 15013 - protein, 16 aa, Artificial
  helical interface sequence
AADVLDWLEEWLQTEW

SEQ ID NO: 15014 - protein, 16 aa, Artificial
  helical interface sequence
DYGVQLREKQKVRRIY

SEQ ID NO: 15015 - protein, 5 aa, Artificial
  helical interface sequence
LEQEQ

SEQ ID NO: 15016 - protein, 6 aa, Artificial
  helical interface sequence
ELREKG

SEQ ID NO: 15017 - protein, 16 aa, Artificial
  helical interface sequence
YTKNLLLNEGIRAWMA

SEQ ID NO: 15018 - protein, 8 aa, Artificial
  helical interface sequence
YNPIYRAG

SEQ ID NO: 15019 - protein, 13 aa, Artificial
  helical interface sequence
LEEVNNNVRLLSE

SEQ ID NO: 15020 - protein, 11 aa, Artificial
  helical interface sequence
EEEIREMLRRV

SEQ ID NO: 15021 - protein, 10 aa, Artificial
  helical interface sequence
EAYRYAALHA

SEQ ID NO: 15022 - protein, 17 aa, Artificial
  helical interface sequence
FSKRRKVAEITGEIQQY

SEQ ID NO: 15023 - protein, 6 aa, Artificial
  helical interface sequence
RFYQDL

SEQ ID NO: 15024 - protein, 23 aa, Artificial
  helical interface sequence
PAEVEALREKVYASLEAYCKHKY

SEQ ID NO: 15025 - protein, 25 aa, Artificial
  helical interface sequence
VLPLLTHFADINTFMVQQIIKFTKD

SEQ ID NO: 15026 - protein, 25 aa, Artificial
  helical interface sequence
VLPLLTHFADINTFMVQQIIKFTKD

SEQ ID NO: 15027 - protein, 15 aa, Artificial
  helical interface sequence
RRMGVEMTLLRALAF

SEQ ID NO: 15028 - protein, 16 aa, Artificial
  helical interface sequence
AGEYGAEALERMFLGF

SEQ ID NO: 15029 - protein, 7 aa, Artificial
  helical interface sequence
FFAENEQ

SEQ ID NO: 15030 - protein, 8 aa, Artificial
  helical interface sequence
TDTQISRL

SEQ ID NO: 15031 - protein, 16 aa, Artificial
  helical interface sequence
REEFGHFIWSHVFQHS

SEQ ID NO: 15032 - protein, 18 aa, Artificial
  helical interface sequence
QATLDADLAHLKSQHDPR

SEQ ID NO: 15033 - protein, 20 aa, Artificial
  helical interface sequence
PAFRAHATRVLGGLDMCIAL

SEQ ID NO: 15034 - protein, 18 aa, Artificial
  helical interface sequence
QATLDADLAHLKSQHDPR

SEQ ID NO: 15035 - protein, 16 aa, Artificial
  helical interface sequence
PDAWSRCFNRITTGMT

SEQ ID NO: 15036 - protein, 17 aa, Artificial
  helical interface sequence
GKEQRILAKTIKRARIL

SEQ ID NO: 15037 - protein, 10 aa, Artificial
  helical interface sequence
AHTLQEMLTI

SEQ ID NO: 15038 - protein, 6 aa, Artificial
  helical interface sequence
LTDILS

SEQ ID NO: 15039 - protein, 6 aa, Artificial
  helical interface sequence
AYRYAD

SEQ ID NO: 15040 - protein, 11 aa, Artificial
  helical interface sequence
VDDQMKLLQNC

SEQ ID NO: 15041 - protein, 10 aa, Artificial
  helical interface sequence
YEEFVQMMTA

SEQ ID NO: 15042 - protein, 24 aa, Artificial
  helical interface sequence
GPLSNETYIQSFAQVWDEHKKRTG

SEQ ID NO: 15043 - protein, 14 aa, Artificial
  helical interface sequence
YSGIVSGIEWATTN

SEQ ID NO: 15044 - protein, 8 aa, Artificial
  helical interface sequence
LLIEMLHA

SEQ ID NO: 15045 - protein, 6 aa, Artificial
  helical interface sequence
DEQLKS

SEQ ID NO: 15046 - protein, 22 aa, Artificial
  helical interface sequence
MDEVRTLQENLRQLQDEYDQQQ

SEQ ID NO: 15047 - protein, 13 aa, Artificial
  helical interface sequence
FQVEYSLEAIKLG

SEQ ID NO: 15048 - protein, 11 aa, Artificial
  helical interface sequence
FQVEYAVKAVE

SEQ ID NO: 15049 - protein, 15 aa, Artificial
  helical interface sequence
TETAASVFKELCYEN

SEQ ID NO: 15050 - protein, 14 aa, Artificial
  helical interface sequence
YSGFYTFSLLDHHY

SEQ ID NO: 15051 - protein, 19 aa, Artificial
  helical interface sequence
VEDALYLGKRSILAAAHRD

SEQ ID NO: 15052 - protein, 15 aa, Artificial
  helical interface sequence
VAAASKILSNLVYQY

SEQ ID NO: 15053 - protein, 23 aa, Artificial
  helical interface sequence
AGDTVQFAEYIQANIQLYSIRED

SEQ ID NO: 15054 - protein, 18 aa, Artificial
  helical interface sequence
APDARVLSNYLRQQCNYS

SEQ ID NO: 15055 - protein, 19 aa, Artificial
  helical interface sequence
VEDALYLGKRSILAAAHRD

SEQ ID NO: 15056 - protein, 15 aa, Artificial
  helical interface sequence
PVEAVKIIYNFYKDK

SEQ ID NO: 15057 - protein, 7 aa, Artificial
  helical interface sequence
EELNKLL

SEQ ID NO: 15058 - protein, 7 aa, Artificial
  helical interface sequence
EELNKLL

SEQ ID NO: 15059 - protein, 7 aa, Artificial
  helical interface sequence
EELNKLL

SEQ ID NO: 15060 - protein, 7 aa, Artificial
  helical interface sequence
EELNKLL

SEQ ID NO: 15061 - protein, 13 aa, Artificial
  helical interface sequence
PQQQQQVLNILKS

SEQ ID NO: 15062 - protein, 13 aa, Artificial
  helical interface sequence
PQQQQQVLNILKS

SEQ ID NO: 15063 - protein, 8 aa, Artificial
  helical interface sequence
AEELAKAL

SEQ ID NO: 15064 - protein, 8 aa, Artificial
  helical interface sequence
VAWRNRCK

SEQ ID NO: 15065 - protein, 7 aa, Artificial
  helical interface sequence
CEDIARV

SEQ ID NO: 15066 - protein, 22 aa, Artificial
  helical interface sequence
GCQLQEALLQQERPIRNSVDEL

SEQ ID NO: 15067 - protein, 6 aa, Artificial
  helical interface sequence
RPLWRH

SEQ ID NO: 15068 - protein, 8 aa, Artificial
  helical interface sequence
LLSEIWDV

SEQ ID NO: 15069 - protein, 14 aa, Artificial
  helical interface sequence
GADVVAHAHRLMNF

SEQ ID NO: 15070 - protein, 6 aa, Artificial
  helical interface sequence
CMAEVI

SEQ ID NO: 15071 - protein, 6 aa, Artificial
  helical interface sequence
DEQLKS

SEQ ID NO: 15072 - protein, 16 aa, Artificial
  helical interface sequence
SKLWAQCVQLHNDILL

SEQ ID NO: 15073 - protein, 7 aa, Artificial
  helical interface sequence
DEQLKSG

SEQ ID NO: 15074 - protein, 11 aa, Artificial
  helical interface sequence
VAEQRRAYLEG

SEQ ID NO: 15075 - protein, 29 aa, Artificial
  helical interface sequence
PEYWDRNTQIFKTNTQTYRESLRNLRGYY

SEQ ID NO: 15076 - protein, 11 aa, Artificial
  helical interface sequence
VAEQRRAYLEG

SEQ ID NO: 15077 - protein, 12 aa, Artificial
  helical interface sequence
SHEVVAWIKRIL

SEQ ID NO: 15078 - protein, 7 aa, Artificial
  helical interface sequence
WELSYRL

SEQ ID NO: 15079 - protein, 10 aa, Artificial
  helical interface sequence
ISQEIRAAED

SEQ ID NO: 15080 - protein, 7 aa, Artificial
  helical interface sequence
FTRWCQL

SEQ ID NO: 15081 - protein, 12 aa, Artificial
  helical interface sequence
YKGVKLAKFGKE

SEQ ID NO: 15082 - protein, 11 aa, Artificial
  helical interface sequence
IEVGEEMDEIT

SEQ ID NO: 15083 - protein, 12 aa, Artificial
  helical interface sequence
EEEIREAFRVFD

SEQ ID NO: 15084 - protein, 8 aa, Artificial
  helical interface sequence
EAEISHTQ

SEQ ID NO: 15085 - protein, 9 aa, Artificial
  helical interface sequence
DHLRRQRQE

SEQ ID NO: 15086 - protein, 11 aa, Artificial
  helical interface sequence
KFELACLANLC

SEQ ID NO: 15087 - protein, 8 aa, Artificial
  helical interface sequence
GYHVGWTH

SEQ ID NO: 15088 - protein, 14 aa, Artificial
  helical interface sequence
QNGLEQAKKFHEAV

SEQ ID NO: 15089 - protein, 16 aa, Artificial
  helical interface sequence
DALADDLKTYGSEVLP

SEQ ID NO: 15090 - protein, 8 aa, Artificial
  helical interface sequence
HTLFRAYT

SEQ ID NO: 15091 - protein, 10 aa, Artificial
  helical interface sequence
PNYRRRLVRW

SEQ ID NO: 15092 - protein, 7 aa, Artificial
  helical interface sequence
QELALKN

SEQ ID NO: 15093 - protein, 12 aa, Artificial
  helical interface sequence
ALRQCCNQLRQV

SEQ ID NO: 15094 - protein, 7 aa, Artificial
  helical interface sequence
LRRLEMY

SEQ ID NO: 15095 - protein, 8 aa, Artificial
  helical interface sequence
HTLFRAYT

SEQ ID NO: 15096 - protein, 10 aa, Artificial
  helical interface sequence
PNYRRRLVRW

SEQ ID NO: 15097 - protein, 7 aa, Artificial
  helical interface sequence
LWLAKGL

SEQ ID NO: 15098 - protein, 10 aa, Artificial
  helical interface sequence
FYGFGSQLLH

SEQ ID NO: 15099 - protein, 7 aa, Artificial
  helical interface sequence
LWLAKGL

SEQ ID NO: 15100 - protein, 13 aa, Artificial
  helical interface sequence
VHEKVKFAFKLYD

SEQ ID NO: 15101 - protein, 8 aa, Artificial
  helical interface sequence
LWLAKGLF

SEQ ID NO: 15102 - protein, 5 aa, Artificial
  helical interface sequence
LDDIL

SEQ ID NO: 15103 - protein, 19 aa, Artificial
  helical interface sequence
LPKIVFLGAVGVVETLKEF

SEQ ID NO: 15104 - protein, 7 aa, Artificial
  helical interface sequence
CEDIARV

SEQ ID NO: 15105 - protein, 12 aa, Artificial
  helical interface sequence
SREVQTAVRLLL

SEQ ID NO: 15106 - protein, 11 aa, Artificial
  helical interface sequence
PRHILLAVAND

SEQ ID NO: 15107 - protein, 24 aa, Artificial
  helical interface sequence
FVGALTVLFGAIAYGEVTAAAATG

SEQ ID NO: 15108 - protein, 6 aa, Artificial
  helical interface sequence
DEELDA

SEQ ID NO: 15109 - protein, 24 aa, Artificial
  helical interface sequence
LSQVEQSGVVVLILTLLSSAGIAA

SEQ ID NO: 15110 - protein, 6 aa, Artificial
  helical interface sequence
PSYWWN

SEQ ID NO: 15111 - protein, 6 aa, Artificial
  helical interface sequence
PSYWWN

SEQ ID NO: 15112 - protein, 18 aa, Artificial
  helical interface sequence
NNQKIVNLKEKVAQLEAQ

SEQ ID NO: 15113 - protein, 22 aa, Artificial
  helical interface sequence
YLYFTTLAEAQERMYDYLAQRD

SEQ ID NO: 15114 - protein, 14 aa, Artificial
  helical interface sequence
KDFRKMLAHCEAVT

SEQ ID NO: 15115 - protein, 16 aa, Artificial
  helical interface sequence
NLGTQTLMDWVAKTMK

SEQ ID NO: 15116 - protein, 17 aa, Artificial
  helical interface sequence
LAKHAVSEGTKAVTKYT

SEQ ID NO: 15117 - protein, 11 aa, Artificial
  helical interface sequence
VALREIRRYQK

SEQ ID NO: 15118 - protein, 6 aa, Artificial
  helical interface sequence
DEQLKS

SEQ ID NO: 15119 - protein, 52 aa, Artificial; identical to SEQ ID NO: 499
  helical interface sequence

SEQ ID NO: 15120 - protein, 9 aa, Artificial
  helical interface sequence
TWFPAYWQG

SEQ ID NO: 15121 - protein, 9 aa, Artificial
  helical interface sequence
YEEFVQMMT

SEQ ID NO: 15122 - protein, 11 aa, Artificial
  helical interface sequence
TKELGTVMRSL

SEQ ID NO: 15123 - protein, 6 aa, Artificial
  helical interface sequence
CCAIEM

SEQ ID NO: 15124 - protein, 14 aa, Artificial
  helical interface sequence
RERETILDLFEWVT

SEQ ID NO: 15125 - protein, 10 aa, Artificial
  helical interface sequence
FRELIYEWAG

SEQ ID NO: 15126 - protein, 13 aa, Artificial
  helical interface sequence
AEELWDYLTETLG

SEQ ID NO: 15127 - protein, 9 aa, Artificial
  helical interface sequence
YLQNITYTP

SEQ ID NO: 15128 - protein, 7 aa, Artificial
  helical interface sequence
DEQLKSG

SEQ ID NO: 15129 - protein, 19 aa, Artificial
  helical interface sequence
ANAILAVSLANAKAAAAAK

SEQ ID NO: 15130 - protein, 23 aa, Artificial
  helical interface sequence
YATAGAGAVATGAAVWPLINQMN

SEQ ID NO: 15131 - protein, 5 aa, Artificial
  helical interface sequence
RDFLY

SEQ ID NO: 15132 - protein, 23 aa, Artificial
  helical interface sequence
YATAGAGAVATGAAVWPLINQMN

SEQ ID NO: 15133 - protein, 11 aa, Artificial
  helical interface sequence
FIQFAFRWMNC

SEQ ID NO: 15134 - protein, 13 aa, Artificial
  helical interface sequence
QRFLTQALHYNTG

SEQ ID NO: 15135 - protein, 7 aa, Artificial
  helical interface sequence
ALHYNTG

SEQ ID NO: 15136 - protein, 17 aa, Artificial
  helical interface sequence
DSVLFYAITTLHNLLLH

SEQ ID NO: 15137 - protein, 16 aa, Artificial
  helical interface sequence
INVVTCAAGILSNLTC

SEQ ID NO: 15138 - protein, 13 aa, Artificial
  helical interface sequence
WMEILILGVVYRS

SEQ ID NO: 15139 - protein, 12 aa, Artificial
  helical interface sequence
YEDRREIRHIWD

SEQ ID NO: 15140 - protein, 19 aa, Artificial
  helical interface sequence
DNYFDAFKTAILHVVAAQL

SEQ ID NO: 15141 - protein, 15 aa, Artificial
  helical interface sequence
EEDHRIVQKQWDILW

SEQ ID NO: 15142 - protein, 12 aa, Artificial
  helical interface sequence
YEDRREIRHIWD

SEQ ID NO: 15143 - protein, 13 aa, Artificial
  helical interface sequence
FRTRESTAKKIKA

SEQ ID NO: 15144 - protein, 16 aa, Artificial
  helical interface sequence
IQSRIVEWKERLDKEF

SEQ ID NO: 15145 - protein, 14 aa, Artificial
  helical interface sequence
PWSISSALALTYLA

SEQ ID NO: 15146 - protein, 13 aa, Artificial
  helical interface sequence
IHSGFKELLTAFN

SEQ ID NO: 15147 - protein, 17 aa, Artificial
  helical interface sequence
IEYSYSIIERMRLGALT

SEQ ID NO: 15148 - protein, 8 aa, Artificial
  helical interface sequence
AEDCELDN

SEQ ID NO: 15149 - protein, 9 aa, Artificial
  helical interface sequence
YRGLRHRRG

SEQ ID NO: 15150 - protein, 8 aa, Artificial
  helical interface sequence
EQLVIEFY

SEQ ID NO: 15151 - protein, 5 aa, Artificial
  helical interface sequence
RSSRA

SEQ ID NO: 15152 - protein, 15 aa, Artificial
  helical interface sequence
LSKQAVAYRQLSLLL

SEQ ID NO: 15153 - protein, 9 aa, Artificial
  helical interface sequence
KKWIQKVID

SEQ ID NO: 15154 - protein, 11 aa, Artificial
  helical interface sequence
PKDIQLARRIR

SEQ ID NO: 15155 - protein, 6 aa, Artificial
  helical interface sequence
PALVFN

SEQ ID NO: 15156 - protein, 8 aa, Artificial
  helical interface sequence
VSSLMNGL

SEQ ID NO: 15157 - protein, 5 aa, Artificial
  helical interface sequence
TEKEF

SEQ ID NO: 15158 - protein, 14 aa, Artificial
  helical interface sequence
FEDFVTALSILLRG

SEQ ID NO: 15159 - protein, 14 aa, Artificial
  helical interface sequence
DIGKNIVTALLRAN

SEQ ID NO: 15160 - protein, 8 aa, Artificial
  helical interface sequence
EASLKKVL

SEQ ID NO: 15161 - protein, 14 aa, Artificial
  helical interface sequence
DKVLRDLMMLSDRY

SEQ ID NO: 15162 - protein, 14 aa, Artificial
  helical interface sequence
DIGKNIVTALLRAN

SEQ ID NO: 15163 - protein, 5 aa, Artificial
  helical interface sequence
FKLIY

SEQ ID NO: 15164 - protein, 10 aa, Artificial
  helical interface sequence
FTSRTSACGL

SEQ ID NO: 15165 - protein, 14 aa, Artificial
  helical interface sequence
IYPEVVHMFAVNMF

SEQ ID NO: 15166 - protein, 25 aa, Artificial
  helical interface sequence
KDLLEQRRAAVDTYCRHNYGVGESF

SEQ ID NO: 15167 - protein, 27 aa, Artificial
  helical interface sequence
VEQIKRNIAILDEIMAKADNDLSYFIS

SEQ ID NO: 15168 - protein, 15 aa, Artificial
  helical interface sequence
VDVKYFAQEALTVLS

SEQ ID NO: 15169 - protein, 8 aa, Artificial
  helical interface sequence
LKDKYQYL

SEQ ID NO: 15170 - protein, 5 aa, Artificial
  helical interface sequence
TRDMA

SEQ ID NO: 15171 - protein, 5 aa, Artificial
  helical interface sequence
KKDIF

SEQ ID NO: 15172 - protein, 7 aa, Artificial
  helical interface sequence
RGDIQTL

SEQ ID NO: 15173 - protein, 12 aa, Artificial
  helical interface sequence
VFELKRIVEGIL

SEQ ID NO: 15174 - protein, 12 aa, Artificial
  helical interface sequence
YKEAQAAMEGLN

SEQ ID NO: 15175 - protein, 6 aa, Artificial
  helical interface sequence
KQLEQE

SEQ ID NO: 15176 - protein, 6 aa, Artificial
  helical interface sequence
VRGAAK

SEQ ID NO: 15177 - protein, 8 aa, Artificial
  helical interface sequence
WYLWCVKH

SEQ ID NO: 15178 - protein, 5 aa, Artificial
  helical interface sequence
YQTIY

SEQ ID NO: 15179 - protein, 25 aa, Artificial
  helical interface sequence
EASMMGLLTNLADRELVHMINWAKR

SEQ ID NO: 15180 - protein, 14 aa, Artificial
  helical interface sequence
YTEKQIGYLFISVL

SEQ ID NO: 15181 - protein, 18 aa, Artificial
  helical interface sequence
PMVVANAVAALSEISESH

SEQ ID NO: 15182 - protein, 9 aa, Artificial
  helical interface sequence
FVLIYELLD

SEQ ID NO: 15183 - protein, 12 aa, Artificial
  helical interface sequence
IQVISNALKVWG

SEQ ID NO: 15184 - protein, 16 aa, Artificial
  helical interface sequence
NVAPALVLSSMIMSAI

SEQ ID NO: 15185 - protein, 6 aa, Artificial
  helical interface sequence
EAEILR

SEQ ID NO: 15186 - protein, 22 aa, Artificial
  helical interface sequence
KDLYLECISQLGQVVGQRLHLD

SEQ ID NO: 15187 - protein, 11 aa, Artificial
  helical interface sequence
AMDVVYALKRQ

SEQ ID NO: 15188 - protein, 10 aa, Artificial
  helical interface sequence
ERVKRGMAEM

SEQ ID NO: 15189 - protein, 6 aa, Artificial
  helical interface sequence
DEQLKS

SEQ ID NO: 15190 - protein, 9 aa, Artificial
  helical interface sequence
FTSRTSACG

SEQ ID NO: 15191 - protein, 5 aa, Artificial
  helical interface sequence
WRVRY

SEQ ID NO: 15192 - protein, 11 aa, Artificial
  helical interface sequence
AMDVVYALKRQ

SEQ ID NO: 15193 - protein, 28 aa, Artificial
  helical interface sequence
IYEETRGVLKVFLENVIRDAVTYTEHAK

SEQ ID NO: 15194 - protein, 10 aa, Artificial
  helical interface sequence
FTGGFFFGGV

SEQ ID NO: 15195 - protein, 10 aa, Artificial
  helical interface sequence
SYGFNAARLA

SEQ ID NO: 15196 - protein, 13 aa, Artificial
  helical interface sequence
VRARHVFSVGLDL

SEQ ID NO: 15197 - protein, 5 aa, Artificial
  helical interface sequence
IVEQC

SEQ ID NO: 15198 - protein, 7 aa, Artificial
  helical interface sequence
LYQLENY

SEQ ID NO: 15199 - protein, 5 aa, Artificial
  helical interface sequence
IVEQC

SEQ ID NO: 15200 - protein, 5 aa, Artificial
  helical interface sequence
IVEQC

SEQ ID NO: 15201 - protein, 7 aa, Artificial
  helical interface sequence
LYQLENY

SEQ ID NO: 15202 - protein, 5 aa, Artificial
  helical interface sequence
IVEQC

SEQ ID NO: 15203 - protein, 5 aa, Artificial
  helical interface sequence
IVEQC

SEQ ID NO: 15204 - protein, 5 aa, Artificial
  helical interface sequence
IVEQC

SEQ ID NO: 15205 - protein, 9 aa, Artificial
  helical interface sequence
DAEYYNKQY

SEQ ID NO: 15206 - protein, 8 aa, Artificial
  helical interface sequence
PLHLAAYD

SEQ ID NO: 15207 - protein, 10 aa, Artificial
  helical interface sequence
KENIIAAAQA

SEQ ID NO: 15208 - protein, 14 aa, Artificial
  helical interface sequence
EVKTEKARVLIASG

SEQ ID NO: 15209 - protein, 12 aa, Artificial
  helical interface sequence
ETAFQGMLRKLD

SEQ ID NO: 15210 - protein, 19 aa, Artificial
  helical interface sequence
LSVTAVVIEGLARHKEELG

SEQ ID NO: 15211 - protein, 6 aa, Artificial
  helical interface sequence
VPMRER

SEQ ID NO: 15212 - protein, 6 aa, Artificial
  helical interface sequence
DDQIEA

SEQ ID NO: 15213 - protein, 7 aa, Artificial
  helical interface sequence
KAEIANK

SEQ ID NO: 15214 - protein, 9 aa, Artificial
  helical interface sequence
QAVLSLYAS

SEQ ID NO: 15215 - protein, 18 aa, Artificial
  helical interface sequence
PEIVECVMEQLEHMEENL

SEQ ID NO: 15216 - protein, 11 aa, Artificial
  helical interface sequence
EELISQAQVVL

SEQ ID NO: 15217 - protein, 29 aa, Artificial
  helical interface sequence
RRDFLYYATAGAGAVATGAAVWPLINQMN

SEQ ID NO: 15218 - protein, 9 aa, Artificial
  helical interface sequence
HSIQTWLLG

SEQ ID NO: 15219 - protein, 15 aa, Artificial
  helical interface sequence
QMSFWGATVITGLFG

SEQ ID NO: 15220 - protein, 28 aa, Artificial
  helical interface sequence
RRDFLYYATAGAGAVATGAAVWPLINQM

SEQ ID NO: 15221 - protein, 29 aa, Artificial
  helical interface sequence
RRDFLYYATAGAGAVATGAAVWPLINQMN

SEQ ID NO: 15222 - protein, 17 aa, Artificial
  helical interface sequence
QMSFWGATVITGLFGAI

SEQ ID NO: 15223 - protein, 17 aa, Artificial
  helical interface sequence
QMSFWGATVITGLFGAI

SEQ ID NO: 15224 - protein, 29 aa, Artificial
  helical interface sequence
RRDFLYYATAGAGAVATGAAVWPLINQMN

SEQ ID NO: 15225 - protein, 29 aa, Artificial
  helical interface sequence
RRDFLYYATAGAGAVATGAAVWPLINQMN

SEQ ID NO: 15226 - protein, 17 aa, Artificial
  helical interface sequence
QMSFWGATVITGLFGAI

SEQ ID NO: 15227 - protein, 5 aa, Artificial
  helical interface sequence
KYELD

SEQ ID NO: 15228 - protein, 21 aa, Artificial
  helical interface sequence
KLLILQQAVQVILGLEQQVRE

SEQ ID NO: 15229 - protein, 7 aa, Artificial
  helical interface sequence
PHCKREG

SEQ ID NO: 15230 - protein, 14 aa, Artificial
  helical interface sequence
FLDLCAMLVCKLFS

SEQ ID NO: 15231 - protein, 13 aa, Artificial
  helical interface sequence
FDEARVELDALFN

SEQ ID NO: 15232 - protein, 5 aa, Artificial
  helical interface sequence
LLFKN

SEQ ID NO: 15233 - protein, 10 aa, Artificial
  helical interface sequence
KSTLLRMIAG

SEQ ID NO: 15234 - protein, 5 aa, Artificial
  helical interface sequence
FGLKL

SEQ ID NO: 15235 - protein, 38 aa, Artificial; identical to SEQ ID NO: 3680
  helical interface sequence

SEQ ID NO: 15236 - protein, 39 aa, Artificial; identical to SEQ ID NO: 1453
  helical interface sequence

SEQ ID NO: 15237 - protein, 16 aa, Artificial
  helical interface sequence
SQERTARLNELQRALV

SEQ ID NO: 15238 - protein, 11 aa, Artificial
  helical interface sequence
YFLQELQRCLK

SEQ ID NO: 15239 - protein, 16 aa, Artificial
  helical interface sequence
DRQHKTRTLKETLEGA

SEQ ID NO: 15240 - protein, 15 aa, Artificial
  helical interface sequence
LLPHLIEATAYNVAR

SEQ ID NO: 15241 - protein, 5 aa, Artificial
  helical interface sequence
PWTQR

SEQ ID NO: 15242 - protein, 13 aa, Artificial
  helical interface sequence
ANKRLDAVNRITA

SEQ ID NO: 15243 - protein, 13 aa, Artificial
  helical interface sequence
ANKRLDAVNRITA

SEQ ID NO: 15244 - protein, 14 aa, Artificial
  helical interface sequence
SRMWDSMIEYEFMV

SEQ ID NO: 15245 - protein, 10 aa, Artificial
  helical interface sequence
IGEFDTLVRK

SEQ ID NO: 15246 - protein, 6 aa, Artificial
  helical interface sequence
GGFTNA

SEQ ID NO: 15247 - protein, 10 aa, Artificial
  helical interface sequence
RICLRELAHK

SEQ ID NO: 15248 - protein, 8 aa, Artificial
  helical interface sequence
LKEVYELF

SEQ ID NO: 15249 - protein, 8 aa, Artificial
  helical interface sequence
FQKLLEVT

SEQ ID NO: 15250 - protein, 8 aa, Artificial
  helical interface sequence
FQKLLEVT

SEQ ID NO: 15251 - protein, 9 aa, Artificial
  helical interface sequence
VRILSKNTG

SEQ ID NO: 15252 - protein, 14 aa, Artificial
  helical interface sequence
MIPKVDCCIRSLAQ

SEQ ID NO: 15253 - protein, 5 aa, Artificial
  helical interface sequence
EFKAN

SEQ ID NO: 15254 - protein, 18 aa, Artificial
  helical interface sequence
GGGLNKKAYSMAKYLRDS

SEQ ID NO: 15255 - protein, 9 aa, Artificial
  helical interface sequence
RFAAEILND

SEQ ID NO: 15256 - protein, 5 aa, Artificial
  helical interface sequence
LPNFF

SEQ ID NO: 15257 - protein, 15 aa, Artificial
  helical interface sequence
PTFMGLALHCIANVG

SEQ ID NO: 15258 - protein, 13 aa, Artificial
  helical interface sequence
EQLYSLAFNQYQS

SEQ ID NO: 15259 - protein, 6 aa, Artificial
  helical interface sequence
SKGDLG

SEQ ID NO: 15260 - protein, 9 aa, Artificial
  helical interface sequence
GPLDEWGIS

SEQ ID NO: 15261 - protein, 5 aa, Artificial
  helical interface sequence
VSIFG

SEQ ID NO: 15262 - protein, 11 aa, Artificial
  helical interface sequence
AFVTGEWGRAH

SEQ ID NO: 15263 - protein, 16 aa, Artificial
  helical interface sequence
GRDMEAMAIGLREAMQ

SEQ ID NO: 15264 - protein, 14 aa, Artificial
  helical interface sequence
SNKRLDAVNAITGN

SEQ ID NO: 15265 - protein, 25 aa, Artificial
  helical interface sequence
NRRMAACLRDMEIILRYVSYALLAG

SEQ ID NO: 15266 - protein, 14 aa, Artificial
  helical interface sequence
SNKRLDAVNAITGN

SEQ ID NO: 15267 - protein, 7 aa, Artificial
  helical interface sequence
DGFIKKF

SEQ ID NO: 15268 - protein, 6 aa, Artificial
  helical interface sequence
KSYLDD

SEQ ID NO: 15269 - protein, 21 aa, Artificial
  helical interface sequence
QACRVLQRVAFSVQKEVEKNL

SEQ ID NO: 15270 - protein, 31 aa, Artificial; identical to SEQ ID NO: 614
  helical interface sequence

SEQ ID NO: 15271 - protein, 10 aa, Artificial
  helical interface sequence
SHVWREITRY

SEQ ID NO: 15272 - protein, 6 aa, Artificial
  helical interface sequence
SEQLTS

SEQ ID NO: 15273 - protein, 6 aa, Artificial
  helical interface sequence
SEQLTS

SEQ ID NO: 15274 - protein, 10 aa, Artificial
  helical interface sequence
SPLYDMLRKN

SEQ ID NO: 15275 - protein, 21 aa, Artificial
  helical interface sequence
PPVQAAYQKVVAGVANALAHK

SEQ ID NO: 15276 - protein, 9 aa, Artificial
  helical interface sequence
YEEFVQMMT

SEQ ID NO: 15277 - protein, 29 aa, Artificial
  helical interface sequence
FPEFLTMMARKMKDTDSEEEIREAFRVFD

SEQ ID NO: 15278 - protein, 6 aa, Artificial
  helical interface sequence
ENMRRP

SEQ ID NO: 15279 - protein, 6 aa, Artificial
  helical interface sequence
RRMLLS

SEQ ID NO: 15280 - protein, 13 aa, Artificial
  helical interface sequence
YAFKLLIQELMSM

SEQ ID NO: 15281 - protein, 6 aa, Artificial
  helical interface sequence
FAYVMA

SEQ ID NO: 15282 - protein, 16 aa, Artificial
  helical interface sequence
DTDSEEEIREAFRVFD

SEQ ID NO: 15283 - protein, 5 aa, Artificial
  helical interface sequence
DLAVR

SEQ ID NO: 15284 - protein, 21 aa, Artificial
  helical interface sequence
TYYKRTIKISGQKAMYALKSK

SEQ ID NO: 15285 - protein, 7 aa, Artificial
  helical interface sequence
KGVFVLN

SEQ ID NO: 15286 - protein, 24 aa, Artificial
  helical interface sequence
FKKMSEAKYQLQKIYNEIDEALKS

SEQ ID NO: 15287 - protein, 10 aa, Artificial
  helical interface sequence
HIVNHLVRAK

SEQ ID NO: 15288 - protein, 11 aa, Artificial
  helical interface sequence
LDRAADIAVMA

SEQ ID NO: 15289 - protein, 11 aa, Artificial
  helical interface sequence
LDRAADIAVMA

SEQ ID NO: 15290 - protein, 17 aa, Artificial
  helical interface sequence
WSNAQNQGIAVARHLVD

SEQ ID NO: 15291 - protein, 5 aa, Artificial
  helical interface sequence
MESSL

SEQ ID NO: 15292 - protein, 17 aa, Artificial
  helical interface sequence
DECRARAGALDAVGGSL

SEQ ID NO: 15293 - protein, 19 aa, Artificial
  helical interface sequence
ASIHDTVENLIILANNSLS

SEQ ID NO: 15294 - protein, 13 aa, Artificial
  helical interface sequence
YSGFYTFSLLDHH

SEQ ID NO: 15295 - protein, 19 aa, Artificial
  helical interface sequence
VEDALYLGKRSILAAAHRD

SEQ ID NO: 15296 - protein, 22 aa, Artificial
  helical interface sequence
APDARVLSNYLRQQCNYSSLVF

SEQ ID NO: 15297 - protein, 14 aa, Artificial
  helical interface sequence
TERARQVLEHLLKE

SEQ ID NO: 15298 - protein, 5 aa, Artificial
  helical interface sequence
KNFYF

SEQ ID NO: 15299 - protein, 15 aa, Artificial
  helical interface sequence
LAESYGDTVQVMRTL

SEQ ID NO: 15300 - protein, 10 aa, Artificial
  helical interface sequence
HHELVYEAII

SEQ ID NO: 15301 - protein, 8 aa, Artificial
  helical interface sequence
LKEYLLSG

SEQ ID NO: 15302 - protein, 5 aa, Artificial
  helical interface sequence
SEQLT

SEQ ID NO: 15303 - protein, 9 aa, Artificial
  helical interface sequence
VFALLFFFG

SEQ ID NO: 15304 - protein, 7 aa, Artificial
  helical interface sequence
EKLAFYD

SEQ ID NO: 15305 - protein, 12 aa, Artificial
  helical interface sequence
GLIVFWAGAMTL

SEQ ID NO: 15306 - protein, 12 aa, Artificial
  helical interface sequence
YLALGGWLTGTT

SEQ ID NO: 15307 - protein, 15 aa, Artificial
  helical interface sequence
MGVIVIVGLFFYGAY

SEQ ID NO: 15308 - protein, 16 aa, Artificial
  helical interface sequence
SLYLGLLLILVLALLF

SEQ ID NO: 15309 - protein, 10 aa, Artificial
  helical interface sequence
TEIGIEMKFK

SEQ ID NO: 15310 - protein, 7 aa, Artificial
  helical interface sequence
GLFYSIF

SEQ ID NO: 15311 - protein, 15 aa, Artificial
  helical interface sequence
HASDVLLNLNRLRSR

SEQ ID NO: 15312 - protein, 15 aa, Artificial
  helical interface sequence
SMYGTILGNIGAALI

SEQ ID NO: 15313 - protein, 15 aa, Artificial
  helical interface sequence
SMYGTILGNIGAALI

SEQ ID NO: 15314 - protein, 10 aa, Artificial
  helical interface sequence
ISQEIRAAED

SEQ ID NO: 15315 - protein, 29 aa, Artificial
  helical interface sequence
PSLKGFFIGLLSGAVVLGLTFAVLIAISQ

SEQ ID NO: 15316 - protein, 12 aa, Artificial
  helical interface sequence
PKDIQLARRIRG

SEQ ID NO: 15317 - protein, 10 aa, Artificial
  helical interface sequence
PRHLQLAVRN

SEQ ID NO: 15318 - protein, 26 aa, Artificial
  helical interface sequence
KRLEREQKLKLYQSATQAVFQKRQAG

SEQ ID NO: 15319 - protein, 8 aa, Artificial
  helical interface sequence
IENEVVKL

SEQ ID NO: 15320 - protein, 12 aa, Artificial
  helical interface sequence
HETRELTKTNLQ

SEQ ID NO: 15321 - protein, 11 aa, Artificial
  helical interface sequence
IDVALRLIYAL

SEQ ID NO: 15322 - protein, 22 aa, Artificial
  helical interface sequence
VGDAQVLVRYMKAELELYRLQR

SEQ ID NO: 15323 - protein, 10 aa, Artificial
  helical interface sequence
KIFERQFLSG

SEQ ID NO: 15324 - protein, 35 aa, Artificial
  helical interface sequence
MKGHNGREFFLRVITGTACHAAHGRHLLDHLIEKY

SEQ ID NO: 15325 - protein, 7 aa, Artificial
  helical interface sequence
DEQLKSG

SEQ ID NO: 15326 - protein, 5 aa, Artificial
  helical interface sequence
WPAIA

SEQ ID NO: 15327 - protein, 5 aa, Artificial
  helical interface sequence
WPAIA

SEQ ID NO: 15328 - protein, 5 aa, Artificial
  helical interface sequence
WPAIA

SEQ ID NO: 15329 - protein, 9 aa, Artificial
  helical interface sequence
QAVLSLYAS

SEQ ID NO: 15330 - protein, 15 aa, Artificial
  helical interface sequence
ELVNKISENCFEKCL

SEQ ID NO: 15331 - protein, 6 aa, Artificial
  helical interface sequence
FNFYSL

SEQ ID NO: 15332 - protein, 8 aa, Artificial
  helical interface sequence
VGPALGQH

SEQ ID NO: 15333 - protein, 22 aa, Artificial
  helical interface sequence
PQLEGFSAESRKLLLIVQALRD

SEQ ID NO: 15334 - protein, 24 aa, Artificial
  helical interface sequence
NLAIQIADNFLRKVYCLYSDYVMK

SEQ ID NO: 15335 - protein, 8 aa, Artificial
  helical interface sequence
AGYFVEHL

SEQ ID NO: 15336 - protein, 32 aa, Artificial; identical to SEQ ID NO: 6965
  helical interface sequence

SEQ ID NO: 15337 - protein, 17 aa, Artificial
  helical interface sequence
VEEFFHLQHYLDTATAP

SEQ ID NO: 15338 - protein, 6 aa, Artificial
  helical interface sequence
SEELQA

SEQ ID NO: 15339 - protein, 7 aa, Artificial
  helical interface sequence
PQGLRDN

SEQ ID NO: 15340 - protein, 7 aa, Artificial
  helical interface sequence
KSEAQAL

SEQ ID NO: 15341 - protein, 10 aa, Artificial
  helical interface sequence
SPLYEMLKRN

SEQ ID NO: 15342 - protein, 25 aa, Artificial
  helical interface sequence
EEMTATCLRDLDYYLRLVTYGIVAG

SEQ ID NO: 15343 - protein, 25 aa, Artificial
  helical interface sequence
AEENFLILTEMATNHVQVLVEFTKK

SEQ ID NO: 15344 - protein, 5 aa, Artificial
  helical interface sequence
SEQLT

SEQ ID NO: 15345 - protein, 20 aa, Artificial
  helical interface sequence
PENFRLLGDILVIILAAHFG

SEQ ID NO: 15346 - protein, 5 aa, Artificial
  helical interface sequence
LLPEA

SEQ ID NO: 15347 - protein, 26 aa, Artificial
  helical interface sequence
VEFKKETYYMFDEMMRRINDTIANYV

SEQ ID NO: 15348 - protein, 21 aa, Artificial
  helical interface sequence
LTKATYWLGALFLVLALLLSV

SEQ ID NO: 15349 - protein, 18 aa, Artificial
  helical interface sequence
TELEDLIPEVEEFYKKNH

SEQ ID NO: 15350 - protein, 14 aa, Artificial
  helical interface sequence
HHVWSYRKWLVDTF

SEQ ID NO: 15351 - protein, 7 aa, Artificial
  helical interface sequence
PQGLRDN

SEQ ID NO: 15352 - protein, 8 aa, Artificial
  helical interface sequence
KFMQFLMG

SEQ ID NO: 15353 - protein, 29 aa, Artificial
  helical interface sequence
PEYWDRETQISKTNTQTYRENLRTALRYY

SEQ ID NO: 15354 - protein, 29 aa, Artificial
  helical interface sequence
PEYWDRETQISKTNTQTYRENLRTALRYY

SEQ ID NO: 15355 - protein, 9 aa, Artificial
  helical interface sequence
EGEQCSAAH

SEQ ID NO: 15356 - protein, 5 aa, Artificial
  helical interface sequence
WAWIV

SEQ ID NO: 15357 - protein, 8 aa, Artificial
  helical interface sequence
EKELLDSY

SEQ ID NO: 15358 - protein, 18 aa, Artificial
  helical interface sequence
PNANATERLQELSNNLNS

SEQ ID NO: 15359 - protein, 5 aa, Artificial
  helical interface sequence
DEQLK

SEQ ID NO: 15360 - protein, 7 aa, Artificial
  helical interface sequence
KQVKSVA

SEQ ID NO: 15361 - protein, 8 aa, Artificial
  helical interface sequence
PEKIRNAC

SEQ ID NO: 15362 - protein, 9 aa, Artificial
  helical interface sequence
EIGIEMKFK

SEQ ID NO: 15363 - protein, 10 aa, Artificial
  helical interface sequence
LLAYLRRKLG

SEQ ID NO: 15364 - protein, 27 aa, Artificial
  helical interface sequence
PEGLRVFYYLVQDLKCLVFSLIGLHFK

SEQ ID NO: 15365 - protein, 13 aa, Artificial
  helical interface sequence
GQIFEAYNMAALW

SEQ ID NO: 15366 - protein, 13 aa, Artificial
  helical interface sequence
GQIFEAYNMAALW

SEQ ID NO: 15367 - protein, 14 aa, Artificial
  helical interface sequence
EMGFAGIAVGAAMA

SEQ ID NO: 15368 - protein, 5 aa, Artificial
  helical interface sequence
VAQYD

SEQ ID NO: 15369 - protein, 15 aa, Artificial
  helical interface sequence
SDVDLSKYITTIAGV

SEQ ID NO: 15370 - protein, 15 aa, Artificial
  helical interface sequence
SDVDLSKYITTIAGV

SEQ ID NO: 15371 - protein, 15 aa, Artificial
  helical interface sequence
SDVDLSKYITTIAGV

SEQ ID NO: 15372 - protein, 15 aa, Artificial
  helical interface sequence
MDSRLQRIHAEIKNS

SEQ ID NO: 15373 - protein, 5 aa, Artificial
  helical interface sequence
PYVKF

SEQ ID NO: 15374 - protein, 5 aa, Artificial
  helical interface sequence
ALDYL

SEQ ID NO: 15375 - protein, 29 aa, Artificial
  helical interface sequence
PEYWDRNTQIFKTNTQTDRESLRNLRGYY

SEQ ID NO: 15376 - protein, 18 aa, Artificial
  helical interface sequence
NAQRKEYAGLYHEVAQAH

SEQ ID NO: 15377 - protein, 18 aa, Artificial
  helical interface sequence
IKNIEKITKTMKIVASTR

SEQ ID NO: 15378 - protein, 10 aa, Artificial
  helical interface sequence
YEELKHLLSR

SEQ ID NO: 15379 - protein, 10 aa, Artificial
  helical interface sequence
YEELKHLLSR

SEQ ID NO: 15380 - protein, 15 aa, Artificial
  helical interface sequence
LDELFLKLFTPILKT

SEQ ID NO: 15381 - protein, 11 aa, Artificial
  helical interface sequence
KSQIQQYLVES

SEQ ID NO: 15382 - protein, 12 aa, Artificial
  helical interface sequence
YHELKVAMKALG

SEQ ID NO: 15383 - protein, 12 aa, Artificial
  helical interface sequence
DEEVDEMIREAD

SEQ ID NO: 15384 - protein, 7 aa, Artificial
  helical interface sequence
KGVFVLN

SEQ ID NO: 15385 - protein, 9 aa, Artificial
  helical interface sequence
LDLAKPRIY

SEQ ID NO: 15386 - protein, 6 aa, Artificial
  helical interface sequence
SEELQA

SEQ ID NO: 15387 - protein, 8 aa, Artificial
  helical interface sequence
LEGALKYM

SEQ ID NO: 15388 - protein, 7 aa, Artificial
  helical interface sequence
IVDRFLA

SEQ ID NO: 15389 - protein, 16 aa, Artificial
  helical interface sequence
LKDYEDQQKQLEQVIA

SEQ ID NO: 15390 - protein, 15 aa, Artificial
  helical interface sequence
RRMGVEMTLLRALAF

SEQ ID NO: 15391 - protein, 11 aa, Artificial
  helical interface sequence
IIAPSEASSNL

SEQ ID NO: 15392 - protein, 19 aa, Artificial
  helical interface sequence
YLKAQKVRRLITNDFLKAF

SEQ ID NO: 15393 - protein, 15 aa, Artificial
  helical interface sequence
PEVKRRIMLGTFALS

SEQ ID NO: 15394 - protein, 15 aa, Artificial
  helical interface sequence
PEVKRRIMLGTFALS

SEQ ID NO: 15395 - protein, 8 aa, Artificial
  helical interface sequence
EAEISHTQ

SEQ ID NO: 15396 - protein, 7 aa, Artificial
  helical interface sequence
PEYFIKG

SEQ ID NO: 15397 - protein, 10 aa, Artificial
  helical interface sequence
DNTLFKWMIF

SEQ ID NO: 15398 - protein, 5 aa, Artificial
  helical interface sequence
EKTFG

SEQ ID NO: 15399 - protein, 9 aa, Artificial
  helical interface sequence
DVNRIFERV

SEQ ID NO: 15400 - protein, 10 aa, Artificial
  helical interface sequence
HFNEVFISLW

SEQ ID NO: 15401 - protein, 8 aa, Artificial
  helical interface sequence
EGTALSRL

SEQ ID NO: 15402 - protein, 17 aa, Artificial
  helical interface sequence
EARLVIKEALVERRRAF

SEQ ID NO: 15403 - protein, 8 aa, Artificial
  helical interface sequence
PEEVRAIS

SEQ ID NO: 15404 - protein, 12 aa, Artificial
  helical interface sequence
HTLGNLIRAELL

SEQ ID NO: 15405 - protein, 15 aa, Artificial
  helical interface sequence
GQEFRVQTMKWYAMF

SEQ ID NO: 15406 - protein, 10 aa, Artificial
  helical interface sequence
VGGEALGRLL

SEQ ID NO: 15407 - protein, 21 aa, Artificial
  helical interface sequence
NAPGAVANRVALEACVKARNE

SEQ ID NO: 15408 - protein, 9 aa, Artificial
  helical interface sequence
RNNNDRMKV

SEQ ID NO: 15409 - protein, 16 aa, Artificial
  helical interface sequence
VEEAGGEALGRLLVVY

SEQ ID NO: 15410 - protein, 20 aa, Artificial
  helical interface sequence
PENFKLLGNVMVIILATHFG

SEQ ID NO: 15411 - protein, 7 aa, Artificial
  helical interface sequence
DEQLKSG

SEQ ID NO: 15412 - protein, 5 aa, Artificial
  helical interface sequence
WPILG

SEQ ID NO: 15413 - protein, 7 aa, Artificial
  helical interface sequence
PRHYMMT

SEQ ID NO: 15414 - protein, 5 aa, Artificial
  helical interface sequence
WPILG

SEQ ID NO: 15415 - protein, 15 aa, Artificial
  helical interface sequence
GTGALRIGAEFLARW

SEQ ID NO: 15416 - protein, 12 aa, Artificial
  helical interface sequence
PVVRKVEQRIAN

SEQ ID NO: 15417 - protein, 13 aa, Artificial
  helical interface sequence
RSRARRCVEACVY

SEQ ID NO: 15418 - protein, 10 aa, Artificial
  helical interface sequence
RPDAEYWNSQ

SEQ ID NO: 15419 - protein, 5 aa, Artificial
  helical interface sequence
AAAHC

SEQ ID NO: 15420 - protein, 9 aa, Artificial
  helical interface sequence
LDWIQTQTG

SEQ ID NO: 15421 - protein, 13 aa, Artificial
  helical interface sequence
PGELDRIKSFVSS

SEQ ID NO: 15422 - protein, 7 aa, Artificial
  helical interface sequence
TPIEEIG

SEQ ID NO: 15423 - protein, 6 aa, Artificial
  helical interface sequence
LSRVLS

SEQ ID NO: 15424 - protein, 33 aa, Artificial; identical to SEQ ID NO: 13726
  helical interface sequence

SEQ ID NO: 15425 - protein, 8 aa, Artificial
  helical interface sequence
RDVQMALH

SEQ ID NO: 15426 - protein, 33 aa, Artificial; identical to SEQ ID NO: 9034
  helical interface sequence

SEQ ID NO: 15427 - protein, 31 aa, Artificial; identical to SEQ ID NO: 1463
  helical interface sequence

SEQ ID NO: 15428 - protein, 7 aa, Artificial
  helical interface sequence
DEQLKSG

SEQ ID NO: 15429 - protein, 7 aa, Artificial
  helical interface sequence
FKEICAV

SEQ ID NO: 15430 - protein, 11 aa, Artificial
  helical interface sequence
VNVGRLVRSYD

SEQ ID NO: 15431 - protein, 12 aa, Artificial
  helical interface sequence
DEEVDEMIREAD

SEQ ID NO: 15432 - protein, 6 aa, Artificial
  helical interface sequence
SEQLTS

SEQ ID NO: 15433 - protein, 6 aa, Artificial
  helical interface sequence
SEQLTS

SEQ ID NO: 15434 - protein, 8 aa, Artificial
  helical interface sequence
PIKVLHEA

SEQ ID NO: 15435 - protein, 6 aa, Artificial
  helical interface sequence
VENFLG

SEQ ID NO: 15436 - protein, 13 aa, Artificial
  helical interface sequence
QDQRIGLSVIQRN

SEQ ID NO: 15437 - protein, 14 aa, Artificial
  helical interface sequence
GKNLYDKVCGHCHK

SEQ ID NO: 15438 - protein, 7 aa, Artificial
  helical interface sequence
LENVLSN

SEQ ID NO: 15439 - protein, 15 aa, Artificial
  helical interface sequence
RLPALRSIGLKCLEH

SEQ ID NO: 15440 - protein, 18 aa, Artificial
  helical interface sequence
RAARALLSAVTRLLILAD

SEQ ID NO: 15441 - protein, 6 aa, Artificial
  helical interface sequence
KQFNTF

SEQ ID NO: 15442 - protein, 6 aa, Artificial
  helical interface sequence
GTKIMR

SEQ ID NO: 15443 - protein, 6 aa, Artificial
  helical interface sequence
GTKIMR

SEQ ID NO: 15444 - protein, 6 aa, Artificial
  helical interface sequence
GTKIMR

SEQ ID NO: 15445 - protein, 6 aa, Artificial
  helical interface sequence
GTKIMR

SEQ ID NO: 15446 - protein, 7 aa, Artificial
  helical interface sequence
QRVLEQH

SEQ ID NO: 15447 - protein, 15 aa, Artificial
  helical interface sequence
DLDRFWLETLLCLIG

SEQ ID NO: 15448 - protein, 8 aa, Artificial
  helical interface sequence
AEDCLRTC

SEQ ID NO: 15449 - protein, 11 aa, Artificial
  helical interface sequence
AMDVVYALKRQ

SEQ ID NO: 15450 - protein, 13 aa, Artificial
  helical interface sequence
AAEGAALFWRWTM

SEQ ID NO: 15451 - protein, 5 aa, Artificial
  helical interface sequence
SEQLT

SEQ ID NO: 15452 - protein, 12 aa, Artificial
  helical interface sequence
SREIQTAVRLLL

SEQ ID NO: 15453 - protein, 23 aa, Artificial
  helical interface sequence
EARKNEFLAGRFAAKEAFSKAFG

SEQ ID NO: 15454 - protein, 21 aa, Artificial
  helical interface sequence
PAVHASLDKFLASVSTVLTSK

SEQ ID NO: 15455 - protein, 20 aa, Artificial
  helical interface sequence
PENFKLLGNVLVCVLAHHFG

SEQ ID NO: 15456 - protein, 20 aa, Artificial
  helical interface sequence
PENFKLLGNVLVCVLAHHFG

SEQ ID NO: 15457 - protein, 6 aa, Artificial
  helical interface sequence
DEQLKS

SEQ ID NO: 15458 - protein, 23 aa, Artificial
  helical interface sequence
AADTEAVTQLIGSNIELHSLYTS

SEQ ID NO: 15459 - protein, 20 aa, Artificial
  helical interface sequence
ISDMQHIERLLKDLVTENAY

SEQ ID NO: 15460 - protein, 12 aa, Artificial
  helical interface sequence
KYPLLLRELFAL

SEQ ID NO: 15461 - protein, 10 aa, Artificial
  helical interface sequence
DELLLGIFSC

SEQ ID NO: 15462 - protein, 12 aa, Artificial
  helical interface sequence
KSARLAVEGLWQ

SEQ ID NO: 15463 - protein, 21 aa, Artificial
  helical interface sequence
DYLWIEAKLEEKVAVLKARAF

SEQ ID NO: 15464 - protein, 6 aa, Artificial
  helical interface sequence
SGSTFI

SEQ ID NO: 15465 - protein, 9 aa, Artificial
  helical interface sequence
SLAAMAVLE

SEQ ID NO: 15466 - protein, 21 aa, Artificial
  helical interface sequence
AADGDALVKRFKNSVKWYHFD

SEQ ID NO: 15467 - protein, 9 aa, Artificial
  helical interface sequence
SLAAMAVLE

SEQ ID NO: 15468 - protein, 22 aa, Artificial
  helical interface sequence
ATDVTTLNEMFRYKTNLYKLKE

SEQ ID NO: 15469 - protein, 16 aa, Artificial
  helical interface sequence
FDGFAIFARDMDMTLN

SEQ ID NO: 15470 - protein, 12 aa, Artificial
  helical interface sequence
GYEFEEFVKRIK

SEQ ID NO: 15471 - protein, 11 aa, Artificial
  helical interface sequence
PSVAIARHVAG

SEQ ID NO: 15472 - protein, 11 aa, Artificial
  helical interface sequence
PSVAIARHVAG

SEQ ID NO: 15473 - protein, 7 aa, Artificial
  helical interface sequence
DEQLKSG

SEQ ID NO: 15474 - protein, 7 aa, Artificial
  helical interface sequence
PGSKSYF

SEQ ID NO: 15475 - protein, 14 aa, Artificial
  helical interface sequence
SNKRLDVVNRITSN

SEQ ID NO: 15476 - protein, 17 aa, Artificial
  helical interface sequence
DAAVEANSYLDYAINAL

SEQ ID NO: 15477 - protein, 16 aa, Artificial
  helical interface sequence
ASTIVSNAARSLFAEQ

SEQ ID NO: 15478 - protein, 25 aa, Artificial
  helical interface sequence
SRRMAACLRDMEIILRYVTYAVFAG

SEQ ID NO: 15479 - protein, 8 aa, Artificial
  helical interface sequence
LDDLRAIY

SEQ ID NO: 15480 - protein, 6 aa, Artificial
  helical interface sequence
ERDIVF

SEQ ID NO: 15481 - protein, 12 aa, Artificial
  helical interface sequence
DAWASRILLEEM

SEQ ID NO: 15482 - protein, 16 aa, Artificial
  helical interface sequence
YDGFAIFARDMDMTLN

SEQ ID NO: 15483 - protein, 19 aa, Artificial
  helical interface sequence
HQSLIEASNFIATIEERQG

SEQ ID NO: 15484 - protein, 8 aa, Artificial
  helical interface sequence
PEEIAFRK

SEQ ID NO: 15485 - protein, 10 aa, Artificial
  helical interface sequence
NYGQYLYKMT

SEQ ID NO: 15486 - protein, 15 aa, Artificial
  helical interface sequence
DVMYTTLLIELCKLQ

SEQ ID NO: 15487 - protein, 17 aa, Artificial
  helical interface sequence
TTCVDRFINWFSHHLSN

SEQ ID NO: 15488 - protein, 15 aa, Artificial
  helical interface sequence
DVMYTTLLIELCKLQ

SEQ ID NO: 15489 - protein, 12 aa, Artificial
  helical interface sequence
EDQAETLKAEVG

SEQ ID NO: 15490 - protein, 5 aa, Artificial
  helical interface sequence
CSSRG

SEQ ID NO: 15491 - protein, 21 aa, Artificial
  helical interface sequence
DVKQLTEAVQKITTESIVIWG

SEQ ID NO: 15492 - protein, 21 aa, Artificial
  helical interface sequence
DVKQLTEAVQKITTESIVIWG

SEQ ID NO: 15493 - protein, 18 aa, Artificial
  helical interface sequence
VNDIQKLVGKLNWASQIY

SEQ ID NO: 15494 - protein, 21 aa, Artificial
  helical interface sequence
DVKQLTEAVQKITTESIVIWG

SEQ ID NO: 15495 - protein, 21 aa, Artificial
  helical interface sequence
DVKQLTEAVQKITTESIVIWG

SEQ ID NO: 15496 - protein, 8 aa, Artificial
  helical interface sequence
INQLVRKG

SEQ ID NO: 15497 - protein, 11 aa, Artificial
  helical interface sequence
GRAMAETLELL

SEQ ID NO: 15498 - protein, 11 aa, Artificial
  helical interface sequence
QQGIELEIENI

SEQ ID NO: 15499 - protein, 19 aa, Artificial
  helical interface sequence
PVNFKFLGHCFLVVVAIHH

SEQ ID NO: 15500 - protein, 5 aa, Artificial
  helical interface sequence
FRKYT

SEQ ID NO: 15501 - protein, 5 aa, Artificial
  helical interface sequence
FRKYT

SEQ ID NO: 15502 - protein, 20 aa, Artificial
  helical interface sequence
DRETRDLTGNGKDLRMTLAH

SEQ ID NO: 15503 - protein, 8 aa, Artificial
  helical interface sequence
HADYLLRT

SEQ ID NO: 15504 - protein, 16 aa, Artificial
  helical interface sequence
TDKDAEALFKCFRSLG

SEQ ID NO: 15505 - protein, 8 aa, Artificial
  helical interface sequence
DDAELATR

SEQ ID NO: 15506 - protein, 7 aa, Artificial
  helical interface sequence
SEQLTSG

SEQ ID NO: 15507 - protein, 17 aa, Artificial
  helical interface sequence
AAGVFEIEREAFISVSG

SEQ ID NO: 15508 - protein, 11 aa, Artificial
  helical interface sequence
RICLRELAHKG

SEQ ID NO: 15509 - protein, 18 aa, Artificial
  helical interface sequence
RLELEAAQKFLERAAVEN

SEQ ID NO: 15510 - protein, 9 aa, Artificial
  helical interface sequence
YEEFVQMMT

SEQ ID NO: 15511 - protein, 14 aa, Artificial
  helical interface sequence
DEQIAAQVDYIVAN

SEQ ID NO: 15512 - protein, 10 aa, Artificial
  helical interface sequence
PELAAACEVW

SEQ ID NO: 15513 - protein, 6 aa, Artificial
  helical interface sequence
PAEYLE

SEQ ID NO: 15514 - protein, 23 aa, Artificial
  helical interface sequence
AADTDMTTQLISSNLELHSLSTG

SEQ ID NO: 15515 - protein, 14 aa, Artificial
  helical interface sequence
PYTLMSMVANLLYE

SEQ ID NO: 15516 - protein, 23 aa, Artificial
  helical interface sequence
GPDYRVLVHRARKLAQQYYLVYQ

SEQ ID NO: 15517 - protein, 17 aa, Artificial
  helical interface sequence
PTAAANFTRRNLADCLR

SEQ ID NO: 15518 - protein, 22 aa, Artificial
  helical interface sequence
AGDTVQFAEYIQKNVQLYKMRN

SEQ ID NO: 15519 - protein, 15 aa, Artificial
  helical interface sequence
YGAYLAQPLLREVLE

SEQ ID NO: 15520 - protein, 5 aa, Artificial
  helical interface sequence
AEKHG

SEQ ID NO: 15521 - protein, 14 aa, Artificial
  helical interface sequence
KREVEVLRRAEKLG

SEQ ID NO: 15522 - protein, 7 aa, Artificial
  helical interface sequence
EEALAAH

SEQ ID NO: 15523 - protein, 12 aa, Artificial
  helical interface sequence
AMVLKLRKGLID

SEQ ID NO: 15524 - protein, 12 aa, Artificial
  helical interface sequence
EDRLQKEMERIY

SEQ ID NO: 15525 - protein, 13 aa, Artificial
  helical interface sequence
DEQIKKQIDYMIS

SEQ ID NO: 15526 - protein, 7 aa, Artificial
  helical interface sequence
LEKVLSG

SEQ ID NO: 15527 - protein, 17 aa, Artificial
  helical interface sequence
EDIASNILNMLRQRVTG

SEQ ID NO: 15528 - protein, 11 aa, Artificial
  helical interface sequence
PEELQEMIDEV

SEQ ID NO: 15529 - protein, 8 aa, Artificial
  helical interface sequence
KTFFQMKD

SEQ ID NO: 15530 - protein, 7 aa, Artificial
  helical interface sequence
TDEIVKD

SEQ ID NO: 15531 - protein, 18 aa, Artificial
  helical interface sequence
RGYWQELIESIVWAHNKL

SEQ ID NO: 15532 - protein, 15 aa, Artificial
  helical interface sequence
VERAGHLLCDKAQKN

SEQ ID NO: 15533 - protein, 22 aa, Artificial
  helical interface sequence
IPDGRHLVNRGREEAASFKKLY

SEQ ID NO: 15534 - protein, 13 aa, Artificial
  helical interface sequence
YSGFYTFSLLDHH

SEQ ID NO: 15535 - protein, 18 aa, Artificial
  helical interface sequence
TEEGLDLLKLCVQELEKR

SEQ ID NO: 15536 - protein, 11 aa, Artificial
  helical interface sequence
QTFAYGVLDSN

SEQ ID NO: 15537 - protein, 14 aa, Artificial
  helical interface sequence
FGAHMANPLLRKVV

SEQ ID NO: 15538 - protein, 13 aa, Artificial
  helical interface sequence
FQVEYALEAVKRG

SEQ ID NO: 15539 - protein, 19 aa, Artificial
  helical interface sequence
PFEQAKKVITMFVQRQVFA

SEQ ID NO: 15540 - protein, 7 aa, Artificial
  helical interface sequence
QHIWNML

SEQ ID NO: 15541 - protein, 21 aa, Artificial
  helical interface sequence
EDLVADYARHVDGTVHLFEKW

SEQ ID NO: 15542 - protein, 21 aa, Artificial
  helical interface sequence
EDLVADYARHVDGTVHLFEKW

SEQ ID NO: 15543 - protein, 17 aa, Artificial
  helical interface sequence
LQLVGTAAMLLASKFEE

SEQ ID NO: 15544 - protein, 19 aa, Artificial
  helical interface sequence
PAVHASLDKFLASVSTVLT

SEQ ID NO: 15545 - protein, 16 aa, Artificial
  helical interface sequence
PVNFKLLSHCLLVTLA

SEQ ID NO: 15546 - protein, 16 aa, Artificial
  helical interface sequence
PVNFKLLSHCLLVTLA

SEQ ID NO: 15547 - protein, 7 aa, Artificial
  helical interface sequence
YEHDLEV

SEQ ID NO: 15548 - protein, 12 aa, Artificial
  helical interface sequence
KPFLWLARKLIG

SEQ ID NO: 15549 - protein, 5 aa, Artificial
  helical interface sequence
ERKYR

SEQ ID NO: 15550 - protein, 17 aa, Artificial
  helical interface sequence
HTAWAFLSAIWLWMVLG

SEQ ID NO: 15551 - protein, 8 aa, Artificial
  helical interface sequence
PLLQEIYR

SEQ ID NO: 15552 - protein, 6 aa, Artificial
  helical interface sequence
SEQLTS

SEQ ID NO: 15553 - protein, 7 aa, Artificial
  helical interface sequence
PAQMAKY

SEQ ID NO: 15554 - protein, 20 aa, Artificial
  helical interface sequence
GKWVFYGLAAILTVVTLIGV

SEQ ID NO: 15555 - protein, 26 aa, Artificial
  helical interface sequence
PEPIIKSLWAVTVVATIVILFVALYW

SEQ ID NO: 15556 - protein, 11 aa, Artificial
  helical interface sequence
IDTCRSMVAVM

SEQ ID NO: 15557 - protein, 13 aa, Artificial
  helical interface sequence
TGFHMLHTLFQTS

SEQ ID NO: 15558 - protein, 12 aa, Artificial
  helical interface sequence
PAAITLAHRYNE

SEQ ID NO: 15559 - protein, 25 aa, Artificial
  helical interface sequence
VFWGLFGAGGMWSAIIAPVMILLVG

SEQ ID NO: 15560 - protein, 7 aa, Artificial
  helical interface sequence
EAIIRKA

SEQ ID NO: 15561 - protein, 6 aa, Artificial
  helical interface sequence
RTFSER

SEQ ID NO: 15562 - protein, 10 aa, Artificial
  helical interface sequence
VKSDLLYAYT

SEQ ID NO: 15563 - protein, 12 aa, Artificial
  helical interface sequence
SREIQTAVRLLL

SEQ ID NO: 15564 - protein, 11 aa, Artificial
  helical interface sequence
TVALREIRRYQ

SEQ ID NO: 15565 - protein, 11 aa, Artificial
  helical interface sequence
AMDVVYALKRQ

SEQ ID NO: 15566 - protein, 5 aa, Artificial
  helical interface sequence
FRKSN

SEQ ID NO: 15567 - protein, 15 aa, Artificial
  helical interface sequence
IELAFSSVEHIMRDV

SEQ ID NO: 15568 - protein, 19 aa, Artificial
  helical interface sequence
HASIRRGYQVYREVCAACH

SEQ ID NO: 15569 - protein, 30 aa, Artificial; identical to SEQ ID NO: 7572
  helical interface sequence

SEQ ID NO: 15570 - protein, 21 aa, Artificial
  helical interface sequence
EDESYARAYRIIRAHQTELTH

SEQ ID NO: 15571 - protein, 21 aa, Artificial
  helical interface sequence
AEDLQEALSSILGILKAVNDS

SEQ ID NO: 15572 - protein, 11 aa, Artificial
  helical interface sequence
VNLYQNYSELI

SEQ ID NO: 15573 - protein, 26 aa, Artificial
  helical interface sequence
MEGIHRWAIWMAVLVTLTGGIGILLS

SEQ ID NO: 15574 - protein, 39 aa, Artificial; identical to SEQ ID NO: 9993
  helical interface sequence

SEQ ID NO: 15575 - protein, 9 aa, Artificial
  helical interface sequence
GPLDEWGIA

SEQ ID NO: 15576 - protein, 14 aa, Artificial
  helical interface sequence
PVSISMSLAMLSLG

SEQ ID NO: 15577 - protein, 5 aa, Artificial
  helical interface sequence
KPTLQ

SEQ ID NO: 15578 - protein, 30 aa, Artificial; identical to SEQ ID NO: 1334
  helical interface sequence

SEQ ID NO: 15579 - protein, 6 aa, Artificial
  helical interface sequence
SAEFIK

SEQ ID NO: 15580 - protein, 6 aa, Artificial
  helical interface sequence
CPIGLI

SEQ ID NO: 15581 - protein, 6 aa, Artificial
  helical interface sequence
EKDIVF

SEQ ID NO: 15582 - protein, 11 aa, Artificial
  helical interface sequence
LWHLRSLVFTD

SEQ ID NO: 15583 - protein, 8 aa, Artificial
  helical interface sequence
FEEFCAVV

SEQ ID NO: 15584 - protein, 5 aa, Artificial
  helical interface sequence
EEFCA

SEQ ID NO: 15585 - protein, 29 aa, Artificial
  helical interface sequence
PEYWDRNTQIFKTNTQTDRESLRNLRGYY

SEQ ID NO: 15586 - protein, 30 aa, Artificial; identical to SEQ ID NO: 9329
  helical interface sequence

SEQ ID NO: 15587 - protein, 10 aa, Artificial
  helical interface sequence
WNESAFSVHA

SEQ ID NO: 15588 - protein, 6 aa, Artificial
  helical interface sequence
EVDFRH

SEQ ID NO: 15589 - protein, 10 aa, Artificial
  helical interface sequence
ASQVGDIARA

SEQ ID NO: 15590 - protein, 22 aa, Artificial
  helical interface sequence
PVTNICQAADKQLFTLVEWAKR

SEQ ID NO: 15591 - protein, 11 aa, Artificial
  helical interface sequence
GEDILFAMSTL

SEQ ID NO: 15592 - protein, 10 aa, Artificial
  helical interface sequence
YKKFIEDVLR

SEQ ID NO: 15593 - protein, 15 aa, Artificial
  helical interface sequence
YQVWHHRRVLVEWLK

SEQ ID NO: 15594 - protein, 17 aa, Artificial
  helical interface sequence
PYLIAFLVDIYEDMLEN

SEQ ID NO: 15595 - protein, 15 aa, Artificial
  helical interface sequence
YQVWHHRRVLVEWLK

SEQ ID NO: 15596 - protein, 17 aa, Artificial
  helical interface sequence
PYLIAFLVDIYEDMLEN

SEQ ID NO: 15597 - protein, 15 aa, Artificial
  helical interface sequence
YQVWHHRRVLVEWLK

SEQ ID NO: 15598 - protein, 15 aa, Artificial
  helical interface sequence
YQVWHHRRVLVEWLK

SEQ ID NO: 15599 - protein, 15 aa, Artificial
  helical interface sequence
YQVWHHRRVLVEWLK

SEQ ID NO: 15600 - protein, 5 aa, Artificial
  helical interface sequence
TTANK

SEQ ID NO: 15601 - protein, 15 aa, Artificial
  helical interface sequence
IETVGAEIADHVMDD

SEQ ID NO: 15602 - protein, 15 aa, Artificial
  helical interface sequence
FLDAVWWLNEALDRG

SEQ ID NO: 15603 - protein, 27 aa, Artificial
  helical interface sequence
GVHDFILVRATAIVLTLYIIYMVGFFA

SEQ ID NO: 15604 - protein, 5 aa, Artificial
  helical interface sequence
LITSL

SEQ ID NO: 15605 - protein, 12 aa, Artificial
  helical interface sequence
LLEWACVLFHTS

SEQ ID NO: 15606 - protein, 12 aa, Artificial
  helical interface sequence
HLRKSEAQAKKE

SEQ ID NO: 15607 - protein, 20 aa, Artificial
  helical interface sequence
MARFLAAKLAIAAKIDYFRG

SEQ ID NO: 15608 - protein, 11 aa, Artificial
  helical interface sequence
STGISVASYLN

SEQ ID NO: 15609 - protein, 11 aa, Artificial
  helical interface sequence
STGISVASYLN

SEQ ID NO: 15610 - protein, 17 aa, Artificial
  helical interface sequence
YMGMVWAMMSIGFLGFI

SEQ ID NO: 15611 - protein, 17 aa, Artificial
  helical interface sequence
YMGMVWAMMSIGFLGFI

SEQ ID NO: 15612 - protein, 6 aa, Artificial
  helical interface sequence
DEDVAL

SEQ ID NO: 15613 - protein, 21 aa, Artificial
  helical interface sequence
EQRTATYITELANALSYCHSK

SEQ ID NO: 15614 - protein, 6 aa, Artificial
  helical interface sequence
SEQLTS

SEQ ID NO: 15615 - protein, 14 aa, Artificial
  helical interface sequence
YSGIVSGIEWATTN

SEQ ID NO: 15616 - protein, 12 aa, Artificial
  helical interface sequence
PKVLVRQFVERF

SEQ ID NO: 15617 - protein, 17 aa, Artificial
  helical interface sequence
RATLRISSQHIANWLRH

SEQ ID NO: 15618 - protein, 8 aa, Artificial
  helical interface sequence
PLLSEIWD

SEQ ID NO: 15619 - protein, 6 aa, Artificial
  helical interface sequence
PSKFTE

SEQ ID NO: 15620 - protein, 7 aa, Artificial
  helical interface sequence
LLMLTLG

SEQ ID NO: 15621 - protein, 17 aa, Artificial
  helical interface sequence
QVGYWAVKIVTGVPDAI

SEQ ID NO: 15622 - protein, 5 aa, Artificial
  helical interface sequence
LSTTE

SEQ ID NO: 15623 - protein, 15 aa, Artificial
  helical interface sequence
QIAELMWHRMQEWRN

SEQ ID NO: 15624 - protein, 24 aa, Artificial
  helical interface sequence
PAEREAELDDLKTELLNARAVQAA

SEQ ID NO: 15625 - protein, 19 aa, Artificial
  helical interface sequence
RLPALRSISLKSFEHLFFF

SEQ ID NO: 15626 - protein, 18 aa, Artificial
  helical interface sequence
RSQIIRIAREFADNADKT

SEQ ID NO: 15627 - protein, 5 aa, Artificial
  helical interface sequence
LVLPG

SEQ ID NO: 15628 - protein, 9 aa, Artificial
  helical interface sequence
YRLTQGVVK

SEQ ID NO: 15629 - protein, 5 aa, Artificial
  helical interface sequence
LVLPG

SEQ ID NO: 15630 - protein, 5 aa, Artificial
  helical interface sequence
LVLPG

SEQ ID NO: 15631 - protein, 9 aa, Artificial
  helical interface sequence
YRLTQGVVK

SEQ ID NO: 15632 - protein, 13 aa, Artificial
  helical interface sequence
WNLQPLLQSAQLT

SEQ ID NO: 15633 - protein, 19 aa, Artificial
  helical interface sequence
AHCASSRQIISHWKNCTRH

SEQ ID NO: 15634 - protein, 8 aa, Artificial
  helical interface sequence
YEELREQL

SEQ ID NO: 15635 - protein, 19 aa, Artificial
  helical interface sequence
YIAPIIGTIIVFLMVVYAE

SEQ ID NO: 15636 - protein, 5 aa, Artificial
  helical interface sequence
VESFL

SEQ ID NO: 15637 - protein, 8 aa, Artificial
  helical interface sequence
VAWRNRCK

SEQ ID NO: 15638 - protein, 8 aa, Artificial
  helical interface sequence
ERELLESY

SEQ ID NO: 15639 - protein, 52 aa, Artificial; identical to SEQ ID NO: 1225
  helical interface sequence

SEQ ID NO: 15640 - protein, 7 aa, Artificial
  helical interface sequence
KVKSQLK

SEQ ID NO: 15641 - protein, 22 aa, Artificial
  helical interface sequence
IPDGRHLVNRGREEAASFKKLY

SEQ ID NO: 15642 - protein, 14 aa, Artificial
  helical interface sequence
FGAHMANPLLRKVV

SEQ ID NO: 15643 - protein, 14 aa, Artificial
  helical interface sequence
YSGFYTFSLLDHHY

SEQ ID NO: 15644 - protein, 13 aa, Artificial
  helical interface sequence
YSGFYTFSLLDHH

SEQ ID NO: 15645 - protein, 10 aa, Artificial
  helical interface sequence
RPATTLVQAA

SEQ ID NO: 15646 - protein, 30 aa, Artificial
  helical interface sequence
SLKGFFIGLLSGAVVLGLTFAVLIAISQID

SEQ ID NO: 15647 - protein, 30 aa, Artificial; identical to SEQ ID NO: 15646
  helical interface sequence

SEQ ID NO: 15648 - protein, 15 aa, Artificial
  helical interface sequence
ADQKDLLRMSWGVLS

SEQ ID NO: 15649 - protein, 7 aa, Artificial
  helical interface sequence
YNRIRSG

SEQ ID NO: 15650 - protein, 19 aa, Artificial
  helical interface sequence
NPDVQAAKNKLKAGYLMSV

SEQ ID NO: 15651 - protein, 20 aa, Artificial
  helical interface sequence
TEELLDFLHARDHCVAHKLF

SEQ ID NO: 15652 - protein, 6 aa, Artificial
  helical interface sequence
SYIVRA

SEQ ID NO: 15653 - protein, 29 aa, Artificial
  helical interface sequence
GWIIRYMHANGASMFFICLYMHVGRGLYY

SEQ ID NO: 15654 - protein, 6 aa, Artificial
  helical interface sequence
IDVVRN

SEQ ID NO: 15655 - protein, 12 aa, Artificial
  helical interface sequence
TKELGTVMRSLG

SEQ ID NO: 15656 - protein, 15 aa, Artificial
  helical interface sequence
EEQIAEFKEAFSLFD

SEQ ID NO: 15657 - protein, 17 aa, Artificial
  helical interface sequence
KQEMVDIIETVYRGARK

SEQ ID NO: 15658 - protein, 9 aa, Artificial
  helical interface sequence
KKWIQKVID

SEQ ID NO: 15659 - protein, 13 aa, Artificial
  helical interface sequence
NGELFQVLKMMVG

SEQ ID NO: 15660 - protein, 7 aa, Artificial
  helical interface sequence
RKQLDKK

SEQ ID NO: 15661 - protein, 16 aa, Artificial
  helical interface sequence
QRLVQNCLWTLRNLSD

SEQ ID NO: 15662 - protein, 14 aa, Artificial
  helical interface sequence
ACEIRALARQWAKK

SEQ ID NO: 15663 - protein, 6 aa, Artificial
  helical interface sequence
RCAHNC

SEQ ID NO: 15664 - protein, 23 aa, Artificial
  helical interface sequence
MDELTEIKTVVSEAVTNAIIHGY

SEQ ID NO: 15665 - protein, 24 aa, Artificial
  helical interface sequence
QNNFVHDCVNITVKQHTVTTTTKG

SEQ ID NO: 15666 - protein, 14 aa, Artificial
  helical interface sequence
TEVKQKLQEFLLSK

SEQ ID NO: 15667 - protein, 8 aa, Artificial
  helical interface sequence
HSLAPMYY

SEQ ID NO: 15668 - protein, 5 aa, Artificial
  helical interface sequence
APMYY

SEQ ID NO: 15669 - protein, 7 aa, Artificial
  helical interface sequence
TIFEKKH

SEQ ID NO: 15670 - protein, 8 aa, Artificial
  helical interface sequence
FMDVYQRS

SEQ ID NO: 15671 - protein, 11 aa, Artificial
  helical interface sequence
AMDVVYALKRQ

SEQ ID NO: 15672 - protein, 11 aa, Artificial
  helical interface sequence
TVALREIRRYQ

SEQ ID NO: 15673 - protein, 11 aa, Artificial
  helical interface sequence
AMDVVYALKRQ

SEQ ID NO: 15674 - protein, 18 aa, Artificial
  helical interface sequence
VNDFYYEVCLKVIEICRQ

SEQ ID NO: 15675 - protein, 16 aa, Artificial
  helical interface sequence
KSRYMELYTHVYNYCT

SEQ ID NO: 15676 - protein, 12 aa, Artificial
  helical interface sequence
KQEFEKQDELKR

SEQ ID NO: 15677 - protein, 15 aa, Artificial
  helical interface sequence
KDFRFMATNDLMTEL

SEQ ID NO: 15678 - protein, 18 aa, Artificial
  helical interface sequence
NNAFRQFVIGVTGYAKQE

SEQ ID NO: 15679 - protein, 15 aa, Artificial
  helical interface sequence
EHDVVNAQRENRIFY

SEQ ID NO: 15680 - protein, 12 aa, Artificial
  helical interface sequence
MFPRMLMKLVSL

SEQ ID NO: 15681 - protein, 7 aa, Artificial
  helical interface sequence
DEQLKSG

SEQ ID NO: 15682 - protein, 5 aa, Artificial
  helical interface sequence
DKLYL

SEQ ID NO: 15683 - protein, 7 aa, Artificial
  helical interface sequence
AEQLASG

SEQ ID NO: 15684 - protein, 21 aa, Artificial
  helical interface sequence
NAPGAAANRVALEACTQARNE

SEQ ID NO: 15685 - protein, 10 aa, Artificial
  helical interface sequence
PELAAACEVW

SEQ ID NO: 15686 - protein, 10 aa, Artificial
  helical interface sequence
PELAAACEVW

SEQ ID NO: 15687 - protein, 14 aa, Artificial
  helical interface sequence
AKNYGRAVYECLRG

SEQ ID NO: 15688 - protein, 14 aa, Artificial
  helical interface sequence
AKNYGRAVYECLRG

SEQ ID NO: 15689 - protein, 23 aa, Artificial
  helical interface sequence
PWPLTGALSALLMTSGLTMWFHF

SEQ ID NO: 15690 - protein, 12 aa, Artificial
  helical interface sequence
ASQKALKEKEKA

SEQ ID NO: 15691 - protein, 28 aa, Artificial
  helical interface sequence
EWKTVVGAAMFFIGFTALLLIWEKHYVY

SEQ ID NO: 15692 - protein, 33 aa, Artificial; identical to SEQ ID NO: 7844
  helical interface sequence

SEQ ID NO: 15693 - protein, 15 aa, Artificial
  helical interface sequence
LLGQLSGQVRLLLGA

SEQ ID NO: 15694 - protein, 7 aa, Artificial
  helical interface sequence
SEQLTSG

SEQ ID NO: 15695 - protein, 5 aa, Artificial
  helical interface sequence
LESFL

SEQ ID NO: 15696 - protein, 13 aa, Artificial
  helical interface sequence
VASKEFEKYTFSD

SEQ ID NO: 15697 - protein, 18 aa, Artificial
  helical interface sequence
RDAIKRIAYEFVEMKAKD

SEQ ID NO: 15698 - protein, 7 aa, Artificial
  helical interface sequence
VREIDEN

SEQ ID NO: 15699 - protein, 29 aa, Artificial
  helical interface sequence
PEYWDQETRNMKAHSQTDRANLGTLRGYY

SEQ ID NO: 15700 - protein, 18 aa, Artificial
  helical interface sequence
RETFYLAQDFFDRYMATQ

SEQ ID NO: 15701 - protein, 12 aa, Artificial
  helical interface sequence
EETRAELSQLCA

SEQ ID NO: 15702 - protein, 13 aa, Artificial
  helical interface sequence
KTIQESHYRALKN

SEQ ID NO: 15703 - protein, 15 aa, Artificial
  helical interface sequence
LKDAINEALRDWVAT

SEQ ID NO: 15704 - protein, 13 aa, Artificial
  helical interface sequence
KTIQESHYRALKN

SEQ ID NO: 15705 - protein, 5 aa, Artificial
  helical interface sequence
AEDLI

SEQ ID NO: 15706 - protein, 30 aa, Artificial
  helical interface sequence
PCEIKRQEVINELFYTERAHVRTLKVLDQV

SEQ ID NO: 15707 - protein, 22 aa, Artificial
  helical interface sequence
NFVNQAVKEAENKQRLEDYQRR

SEQ ID NO: 15708 - protein, 12 aa, Artificial
  helical interface sequence
ATAEAYRYAALH

SEQ ID NO: 15709 - protein, 13 aa, Artificial
  helical interface sequence
SAEFIKNLSSIRR

SEQ ID NO: 15710 - protein, 8 aa, Artificial
  helical interface sequence
LTEIKKQI

SEQ ID NO: 15711 - protein, 13 aa, Artificial
  helical interface sequence
SEEEIREAFRVFD

SEQ ID NO: 15712 - protein, 10 aa, Artificial
  helical interface sequence
YEEFVQMMTA

SEQ ID NO: 15713 - protein, 10 aa, Artificial
  helical interface sequence
LALLEHLIPQ

SEQ ID NO: 15714 - protein, 9 aa, Artificial
  helical interface sequence
ALLRYLLDK

SEQ ID NO: 15715 - protein, 25 aa, Artificial
  helical interface sequence
YYQGLTLHGVLNAIVFTQLFAQAIM

SEQ ID NO: 15716 - protein, 24 aa, Artificial
  helical interface sequence
PAFVAPVLGLLGFIPGGAGGIVNA

SEQ ID NO: 15717 - protein, 17 aa, Artificial
  helical interface sequence
DVVKESVNELSEKAKTD

SEQ ID NO: 15718 - protein, 9 aa, Artificial
  helical interface sequence
AAVQIHNLL

SEQ ID NO: 15719 - protein, 25 aa, Artificial
  helical interface sequence
VLPLVTHFADINTFMVLQVIKFTKD

SEQ ID NO: 15720 - protein, 7 aa, Artificial
  helical interface sequence
KILHRLL

SEQ ID NO: 15721 - protein, 20 aa, Artificial
  helical interface sequence
RFCSAIREVYEQLYDTLDIT

SEQ ID NO: 15722 - protein, 15 aa, Artificial
  helical interface sequence
QSQEDISLLLQLVQN

SEQ ID NO: 15723 - protein, 13 aa, Artificial
  helical interface sequence
IEDLFSSLKHIQH

SEQ ID NO: 15724 - protein, 15 aa, Artificial
  helical interface sequence
RAARNHVNRMCLAAD

SEQ ID NO: 15725 - protein, 23 aa, Artificial
  helical interface sequence
VADARVLVDFARISAQQEKVTYG

SEQ ID NO: 15726 - protein, 5 aa, Artificial
  helical interface sequence
FEKKQ

SEQ ID NO: 15727 - protein, 15 aa, Artificial
  helical interface sequence
MKEVLFYLGQYIMTK

SEQ ID NO: 15728 - protein, 10 aa, Artificial
  helical interface sequence
PLLQGRLFSY

SEQ ID NO: 15729 - protein, 8 aa, Artificial
  helical interface sequence
FFAENEQA

SEQ ID NO: 15730 - protein, 18 aa, Artificial
  helical interface sequence
PLLQGRLFSYTDTQISRL

SEQ ID NO: 15731 - protein, 28 aa, Artificial
  helical interface sequence
QILQERNELKAKVFLLKEELAYFQRELL

SEQ ID NO: 15732 - protein, 18 aa, Artificial
  helical interface sequence
IPTLESMLDHLAGQHAVR

SEQ ID NO: 15733 - protein, 16 aa, Artificial
  helical interface sequence
MLERAKVKDEWAKAYG

SEQ ID NO: 15734 - protein, 6 aa, Artificial
  helical interface sequence
SEQLTS

SEQ ID NO: 15735 - protein, 11 aa, Artificial
  helical interface sequence
EAELQDMINEV

SEQ ID NO: 15736 - protein, 11 aa, Artificial
  helical interface sequence
KSCLLHQFIEK

SEQ ID NO: 15737 - protein, 22 aa, Artificial
  helical interface sequence
AADTEAVTQLIGSNIELHSLYT

SEQ ID NO: 15738 - protein, 18 aa, Artificial
  helical interface sequence
APDARVLSNYLRQQCNYS

SEQ ID NO: 15739 - protein, 5 aa, Artificial
  helical interface sequence
EYEQL

SEQ ID NO: 15740 - protein, 14 aa, Artificial
  helical interface sequence
YSGFYTFSLLDHHY

SEQ ID NO: 15741 - protein, 5 aa, Artificial
  helical interface sequence
LVSIN

SEQ ID NO: 15742 - protein, 15 aa, Artificial
  helical interface sequence
VSELAELVKKLEDKF

SEQ ID NO: 15743 - protein, 13 aa, Artificial
  helical interface sequence
TVALREIRRYQKS

SEQ ID NO: 15744 - protein, 13 aa, Artificial
  helical interface sequence
TVALREIRRYQKS

SEQ ID NO: 15745 - protein, 8 aa, Artificial
  helical interface sequence
RPDAEYWN

SEQ ID NO: 15746 - protein, 21 aa, Artificial
  helical interface sequence
GALANIAVDKANLEIMTKRSN

SEQ ID NO: 15747 - protein, 20 aa, Artificial
  helical interface sequence
ALANIAVDKANLEIMTKRSN

SEQ ID NO: 15748 - protein, 8 aa, Artificial
  helical interface sequence
RPDAEYWN

SEQ ID NO: 15749 - protein, 11 aa, Artificial
  helical interface sequence
TVALREIRRYQ

SEQ ID NO: 15750 - protein, 11 aa, Artificial
  helical interface sequence
AMDVVYALKRQ

SEQ ID NO: 15751 - protein, 5 aa, Artificial
  helical interface sequence
ECVSK

SEQ ID NO: 15752 - protein, 13 aa, Artificial
  helical interface sequence
TCLRALVEMARVG

SEQ ID NO: 15753 - protein, 48 aa, Artificial; identical to SEQ ID NO: 1509
  helical interface sequence

SEQ ID NO: 15754 - protein, 24 aa, Artificial
  helical interface sequence
TAPVSAVQAAVSNLVRVGKETVQT

SEQ ID NO: 15755 - protein, 22 aa, Artificial
  helical interface sequence
GCQLQEALLQQERPIRNSVDEL

SEQ ID NO: 15756 - protein, 25 aa, Artificial
  helical interface sequence
CRMKGLIDEVNQDFTNRINKLKNSL

SEQ ID NO: 15757 - protein, 14 aa, Artificial
  helical interface sequence
SMEIMEAYSVARQF

SEQ ID NO: 15758 - protein, 20 aa, Artificial
  helical interface sequence
PDNFKLLADCLTIVVAARFG

SEQ ID NO: 15759 - protein, 6 aa, Artificial
  helical interface sequence
SEQLTS

SEQ ID NO: 15760 - protein, 18 aa, Artificial
  helical interface sequence
GAIFDRVLTELVSKMRDM

SEQ ID NO: 15761 - protein, 6 aa, Artificial
  helical interface sequence
SEQLTS

SEQ ID NO: 15762 - protein, 8 aa, Artificial
  helical interface sequence
SRILLEEM

SEQ ID NO: 15763 - protein, 16 aa, Artificial
  helical interface sequence
FDGFAIFARDMDMTLN

SEQ ID NO: 15764 - protein, 9 aa, Artificial
  helical interface sequence
EKARKDRNK

SEQ ID NO: 15765 - protein, 8 aa, Artificial
  helical interface sequence
SRILLEEM

SEQ ID NO: 15766 - protein, 6 aa, Artificial
  helical interface sequence
SEQLTS

SEQ ID NO: 15767 - protein, 7 aa, Artificial
  helical interface sequence
DEQLKSG

SEQ ID NO: 15768 - protein, 5 aa, Artificial
  helical interface sequence
SEQLT

SEQ ID NO: 15769 - protein, 13 aa, Artificial
  helical interface sequence
LCVEWLRRYLENG

SEQ ID NO: 15770 - protein, 16 aa, Artificial
  helical interface sequence
PITLMERELVEIFRAL

SEQ ID NO: 15771 - protein, 13 aa, Artificial
  helical interface sequence
EEDLVEEVARIQG

SEQ ID NO: 15772 - protein, 5 aa, Artificial
  helical interface sequence
ICVAY

SEQ ID NO: 15773 - protein, 13 aa, Artificial
  helical interface sequence
IFRFLLFFQGFHN

SEQ ID NO: 15774 - protein, 7 aa, Artificial
  helical interface sequence
FTRWCQL

SEQ ID NO: 15775 - protein, 8 aa, Artificial
  helical interface sequence
IAGYKETG

SEQ ID NO: 15776 - protein, 5 aa, Artificial
  helical interface sequence
LKDVV

SEQ ID NO: 15777 - protein, 14 aa, Artificial
  helical interface sequence
SLQVVAFINSLRDD

SEQ ID NO: 15778 - protein, 12 aa, Artificial
  helical interface sequence
DEEVDEMIREAD

SEQ ID NO: 15779 - protein, 7 aa, Artificial
  helical interface sequence
AARLASE

SEQ ID NO: 15780 - protein, 29 aa, Artificial
  helical interface sequence
MTLSISVLLSLTVFLLVIVELIPSTSSAV

SEQ ID NO: 15781 - protein, 16 aa, Artificial
  helical interface sequence
KHLFQGYLNIYNNYFK

SEQ ID NO: 15782 - protein, 9 aa, Artificial
  helical interface sequence
MNVLLAEAK

SEQ ID NO: 15783 - protein, 13 aa, Artificial
  helical interface sequence
IFIVLNMIRETYD

SEQ ID NO: 15784 - protein, 5 aa, Artificial
  helical interface sequence
MQRRF

SEQ ID NO: 15785 - protein, 6 aa, Artificial
  helical interface sequence
PRCAWR

SEQ ID NO: 15786 - protein, 15 aa, Artificial
  helical interface sequence
ENIWSTLRLALSMLG

SEQ ID NO: 15787 - protein, 10 aa, Artificial
  helical interface sequence
TRLKDYLEEY

SEQ ID NO: 15788 - protein, 18 aa, Artificial
  helical interface sequence
NETLHLAVNYIDRFLSSM

SEQ ID NO: 15789 - protein, 17 aa, Artificial
  helical interface sequence
TLESDDGENMSSATYVN

SEQ ID NO: 15790 - protein, 12 aa, Artificial
  helical interface sequence
LVDDFEKKFNAL

SEQ ID NO: 15791 - protein, 10 aa, Artificial
  helical interface sequence
ELLRRCLDNC

SEQ ID NO: 15792 - protein, 18 aa, Artificial
  helical interface sequence
EEDLKATLREIRRALMDA

SEQ ID NO: 15793 - protein, 17 aa, Artificial
  helical interface sequence
KDEVKELIWKSSLEVLG

SEQ ID NO: 15794 - protein, 7 aa, Artificial
  helical interface sequence
GVLVSNR

SEQ ID NO: 15795 - protein, 10 aa, Artificial
  helical interface sequence
PNYRRRLVRW

SEQ ID NO: 15796 - protein, 5 aa, Artificial
  helical interface sequence
QKDLW

SEQ ID NO: 15797 - protein, 25 aa, Artificial
  helical interface sequence
IDGFLLTPVQKICKYPLQLAELLKY

SEQ ID NO: 15798 - protein, 7 aa, Artificial
  helical interface sequence
EAELQDM

SEQ ID NO: 15799 - protein, 11 aa, Artificial
  helical interface sequence
AAELRHVMTNL

SEQ ID NO: 15800 - protein, 10 aa, Artificial
  helical interface sequence
QKIRGQMPER

SEQ ID NO: 15801 - protein, 5 aa, Artificial
  helical interface sequence
QKDLW

SEQ ID NO: 15802 - protein, 10 aa, Artificial
  helical interface sequence
PNYRRRLVRW

SEQ ID NO: 15803 - protein, 5 aa, Artificial
  helical interface sequence
QKDLW

SEQ ID NO: 15804 - protein, 10 aa, Artificial
  helical interface sequence
PNYRRRLVRW

SEQ ID NO: 15805 - protein, 10 aa, Artificial
  helical interface sequence
PNYRRRLVRW

SEQ ID NO: 15806 - protein, 5 aa, Artificial
  helical interface sequence
QKDLW

SEQ ID NO: 15807 - protein, 5 aa, Artificial
  helical interface sequence
QKDLW

SEQ ID NO: 15808 - protein, 10 aa, Artificial
  helical interface sequence
PNYRRRLVRW

SEQ ID NO: 15809 - protein, 10 aa, Artificial
  helical interface sequence
EPLLLRVLAE

SEQ ID NO: 15810 - protein, 12 aa, Artificial
  helical interface sequence
VPLGLILVPFIE

SEQ ID NO: 15811 - protein, 12 aa, Artificial
  helical interface sequence
YKKLQDQRIGLS

SEQ ID NO: 15812 - protein, 5 aa, Artificial
  helical interface sequence
VCRCL

SEQ ID NO: 15813 - protein, 10 aa, Artificial
  helical interface sequence
KSSLVLRFVK

SEQ ID NO: 15814 - protein, 11 aa, Artificial
  helical interface sequence
IDEWKDFVSLN

SEQ ID NO: 15815 - protein, 7 aa, Artificial
  helical interface sequence
LIRELHR

SEQ ID NO: 15816 - protein, 17 aa, Artificial
  helical interface sequence
DTRIAKLRVSADSFVRQ

SEQ ID NO: 15817 - protein, 9 aa, Artificial
  helical interface sequence
RQKLMEATS

SEQ ID NO: 15818 - protein, 11 aa, Artificial
  helical interface sequence
PAARKLARELG

SEQ ID NO: 15819 - protein, 6 aa, Artificial
  helical interface sequence
CEDIAR

SEQ ID NO: 15820 - protein, 29 aa, Artificial
  helical interface sequence
SSAVMALQEASEAYLVGLFEDTNLCAIHA

SEQ ID NO: 15821 - protein, 7 aa, Artificial
  helical interface sequence
SEQLTSG

SEQ ID NO: 15822 - protein, 9 aa, Artificial
  helical interface sequence
QAVLSLYAS

SEQ ID NO: 15823 - protein, 23 aa, Artificial
  helical interface sequence
AAVAVEFARLYAVELEHYEKLEG

SEQ ID NO: 15824 - protein, 23 aa, Artificial
  helical interface sequence
AAVAVEFARLYAVELEHYEKLEG

SEQ ID NO: 15825 - protein, 23 aa, Artificial
  helical interface sequence
AAVAVEFARLYAVELEHYEKLEG

SEQ ID NO: 15826 - protein, 17 aa, Artificial
  helical interface sequence
QPAGLQAAEAAVDAIKG

SEQ ID NO: 15827 - protein, 17 aa, Artificial
  helical interface sequence
QPAGLQAAEAAVDAIKG

SEQ ID NO: 15828 - protein, 17 aa, Artificial
  helical interface sequence
QPAGLQAAEAAVDAIKG

SEQ ID NO: 15829 - protein, 8 aa, Artificial
  helical interface sequence
EIRRYQKS

SEQ ID NO: 15830 - protein, 11 aa, Artificial
  helical interface sequence
PKDIQLARRIR

SEQ ID NO: 15831 - protein, 12 aa, Artificial
  helical interface sequence
VFELKRIVEGIL

SEQ ID NO: 15832 - protein, 13 aa, Artificial
  helical interface sequence
FIDYAIEYSEKYA

SEQ ID NO: 15833 - protein, 12 aa, Artificial
  helical interface sequence
AAELRHVMTNLG

SEQ ID NO: 15834 - protein, 6 aa, Artificial
  helical interface sequence
SEQLTS

SEQ ID NO: 15835 - protein, 6 aa, Artificial
  helical interface sequence
FEKTME

SEQ ID NO: 15836 - protein, 14 aa, Artificial
  helical interface sequence
RERETILDLFEWVT

SEQ ID NO: 15837 - protein, 17 aa, Artificial
  helical interface sequence
QMSFWGATVITGLFGAI

SEQ ID NO: 15838 - protein, 28 aa, Artificial
  helical interface sequence
LMARKQAGFTAVMFLTVLSVLLYLTNKR

SEQ ID NO: 15839 - protein, 23 aa, Artificial
  helical interface sequence
YATAGAGAVATGAAVWPLINQMN

SEQ ID NO: 15840 - protein, 22 aa, Artificial
  helical interface sequence
AQGALANIAVDKANLEIMTKRS

SEQ ID NO: 15841 - protein, 6 aa, Artificial
  helical interface sequence
SEQLTS

SEQ ID NO: 15842 - protein, 10 aa, Artificial
  helical interface sequence
FRVLVKELQA

SEQ ID NO: 15843 - protein, 12 aa, Artificial
  helical interface sequence
QRFLTQALHYNT

SEQ ID NO: 15844 - protein, 18 aa, Artificial
  helical interface sequence
LTFAYERLSHFRCELLRR

SEQ ID NO: 15845 - protein, 15 aa, Artificial
  helical interface sequence
SVLDEAFQRYRDLLF

SEQ ID NO: 15846 - protein, 10 aa, Artificial
  helical interface sequence
YKNKMMVCQV

SEQ ID NO: 15847 - protein, 10 aa, Artificial
  helical interface sequence
PDDIEQWFTE

SEQ ID NO: 15848 - protein, 19 aa, Artificial
  helical interface sequence
PEFGAHSQRVLSGLDITIS

SEQ ID NO: 15849 - protein, 16 aa, Artificial
  helical interface sequence
VTESLKVKLQWASAFG

SEQ ID NO: 15850 - protein, 8 aa, Artificial
  helical interface sequence
SKEALQIL

SEQ ID NO: 15851 - protein, 15 aa, Artificial
  helical interface sequence
KKKLKEVHRKIMLAN

SEQ ID NO: 15852 - protein, 11 aa, Artificial
  helical interface sequence
IKNLRRVAKEL

SEQ ID NO: 15853 - protein, 7 aa, Artificial
  helical interface sequence
RRYYENY

SEQ ID NO: 15854 - protein, 19 aa, Artificial
  helical interface sequence
KDTHIRELEDYIDNLLVRV

SEQ ID NO: 15855 - protein, 6 aa, Artificial
  helical interface sequence
SEQLTS

SEQ ID NO: 15856 - protein, 18 aa, Artificial
  helical interface sequence
DFMIVALDLLSGLAEGLG

SEQ ID NO: 15857 - protein, 12 aa, Artificial
  helical interface sequence
SDLVEALYLVCG

SEQ ID NO: 15858 - protein, 45 aa, Artificial
  helical interface sequence
SETYGFLNRLAEAKITLSQQLNTLQQQQESAKAQLSILINRSGSW

SEQ ID NO: 15859 - protein, 18 aa, Artificial
  helical interface sequence
ISEGLFYQTQIRRLAIKK

SEQ ID NO: 15860 - protein, 7 aa, Artificial
  helical interface sequence
ALKALEG

SEQ ID NO: 15861 - protein, 7 aa, Artificial
  helical interface sequence
ALKALEG

SEQ ID NO: 15862 - protein, 11 aa, Artificial
  helical interface sequence
RICLRELAHKG

SEQ ID NO: 15863 - protein, 11 aa, Artificial
  helical interface sequence
AVPRAILELAG

SEQ ID NO: 15864 - protein, 15 aa, Artificial
  helical interface sequence
LSKQAVAYRQLSLLL

SEQ ID NO: 15865 - protein, 9 aa, Artificial
  helical interface sequence
PAPATTFAH

SEQ ID NO: 15866 - protein, 15 aa, Artificial
  helical interface sequence
LSKQAVAYRQLSLLL

SEQ ID NO: 15867 - protein, 63 aa, Artificial
  helical interface sequence
EYTLANQMLTAMAQGYAAEISARRNAMDNASKNAGDMINRYSILYNRTRQAVITNELVDIITG

SEQ ID NO: 15868 - protein, 6 aa, Artificial
  helical interface sequence
NIPTNL

SEQ ID NO: 15869 - protein, 6 aa, Artificial
  helical interface sequence
SEQLTS

SEQ ID NO: 15870 - protein, 12 aa, Artificial
  helical interface sequence
FGVMREAIAAAK

SEQ ID NO: 15871 - protein, 8 aa, Artificial
  helical interface sequence
EEYFRKAI

SEQ ID NO: 15872 - protein, 25 aa, Artificial
  helical interface sequence
GLRVFYYLVQDLKCLVFSLIGLHFK

SEQ ID NO: 15873 - protein, 5 aa, Artificial
  helical interface sequence
AMRAV

SEQ ID NO: 15874 - protein, 12 aa, Artificial
  helical interface sequence
EDTFKQIYAQFF

SEQ ID NO: 15875 - protein, 9 aa, Artificial
  helical interface sequence
KEVFDYAVL

SEQ ID NO: 15876 - protein, 16 aa, Artificial
  helical interface sequence
DALMVGMGVVIRLYDE

SEQ ID NO: 15877 - protein, 8 aa, Artificial
  helical interface sequence
EASLKKVL

SEQ ID NO: 15878 - protein, 20 aa, Artificial
  helical interface sequence
DLIDDALMVGMGVVIRLYDE

SEQ ID NO: 15879 - protein, 22 aa, Artificial
  helical interface sequence
TVQCWSETLAYDCALMNTALET

SEQ ID NO: 15880 - protein, 7 aa, Artificial
  helical interface sequence
SEQLTSG

SEQ ID NO: 15881 - protein, 7 aa, Artificial
  helical interface sequence
SEQLTSG

SEQ ID NO: 15882 - protein, 11 aa, Artificial
  helical interface sequence
LGLRAYIRKQI

SEQ ID NO: 15883 - protein, 15 aa, Artificial
  helical interface sequence
AAVDTYCRHNYGVGE

SEQ ID NO: 15884 - protein, 22 aa, Artificial
  helical interface sequence
AQGALANIAVDKANLEIMTKRS

SEQ ID NO: 15885 - protein, 16 aa, Artificial
  helical interface sequence
AQEFLRFLLDGLHNEV

SEQ ID NO: 15886 - protein, 19 aa, Artificial
  helical interface sequence
HASIRRGYQVYREVCAACH

SEQ ID NO: 15887 - protein, 17 aa, Artificial
  helical interface sequence
VEEFFHLQHYLDTATAP

SEQ ID NO: 15888 - protein, 7 aa, Artificial
  helical interface sequence
KGVFVLN

SEQ ID NO: 15889 - protein, 13 aa, Artificial
  helical interface sequence
AVDTYCRHNYGVG

SEQ ID NO: 15890 - protein, 8 aa, Artificial
  helical interface sequence
NAKIAGDA

SEQ ID NO: 15891 - protein, 6 aa, Artificial
  helical interface sequence
PEKYIQ

SEQ ID NO: 15892 - protein, 13 aa, Artificial
  helical interface sequence
AALDESKAYWMDD

SEQ ID NO: 15893 - protein, 11 aa, Artificial
  helical interface sequence
DEEVDEMIREA

SEQ ID NO: 15894 - protein, 11 aa, Artificial
  helical interface sequence
VGEDIRKLDYG

SEQ ID NO: 15895 - protein, 6 aa, Artificial
  helical interface sequence
HTWKLC

SEQ ID NO: 15896 - protein, 7 aa, Artificial
  helical interface sequence
LREQFNL

SEQ ID NO: 15897 - protein, 11 aa, Artificial
  helical interface sequence
TLNLRYTRVAL

SEQ ID NO: 15898 - protein, 5 aa, Artificial
  helical interface sequence
CADCH

SEQ ID NO: 15899 - protein, 11 aa, Artificial
  helical interface sequence
LEIVKKALSDA

SEQ ID NO: 15900 - protein, 16 aa, Artificial
  helical interface sequence
LTMTRNAVWALSNLCR

SEQ ID NO: 15901 - protein, 7 aa, Artificial
  helical interface sequence
SEQLTSG

SEQ ID NO: 15902 - protein, 9 aa, Artificial
  helical interface sequence
RKFLMECRN

SEQ ID NO: 15903 - protein, 6 aa, Artificial
  helical interface sequence
RAIAEL

SEQ ID NO: 15904 - protein, 8 aa, Artificial
  helical interface sequence
TDILATVL

SEQ ID NO: 15905 - protein, 16 aa, Artificial
  helical interface sequence
PDLRDRGYIYWRLLST

SEQ ID NO: 15906 - protein, 20 aa, Artificial
  helical interface sequence
NLAYLEAIHNFVEVLNEYFH

SEQ ID NO: 15907 - protein, 12 aa, Artificial
  helical interface sequence
FEEFITVLSTTS

SEQ ID NO: 15908 - protein, 17 aa, Artificial
  helical interface sequence
QEQVYNACAKQIVKDVL

SEQ ID NO: 15909 - protein, 17 aa, Artificial
  helical interface sequence
EKQYETLENQLAFLTQQ

SEQ ID NO: 15910 - protein, 31 aa, Artificial; identical to SEQ ID NO: 10984
  helical interface sequence

SEQ ID NO: 15911 - protein, 11 aa, Artificial
  helical interface sequence
SSVKKILSKAS

SEQ ID NO: 15912 - protein, 20 aa, Artificial
  helical interface sequence
SALALSNAITNLAASIFGEQ

SEQ ID NO: 15913 - protein, 12 aa, Artificial
  helical interface sequence
CKDSILEAIDAG

SEQ ID NO: 15914 - protein, 7 aa, Artificial
  helical interface sequence
EEQEREG

SEQ ID NO: 15915 - protein, 7 aa, Artificial
  helical interface sequence
EEQEREG

SEQ ID NO: 15916 - protein, 7 aa, Artificial
  helical interface sequence
EEQEREG

SEQ ID NO: 15917 - protein, 10 aa, Artificial
  helical interface sequence
ERVKRGMAEM

SEQ ID NO: 15918 - protein, 15 aa, Artificial
  helical interface sequence
IIARRWINGMLISLL

SEQ ID NO: 15919 - protein, 18 aa, Artificial
  helical interface sequence
RAYIRKQINNIFYRFIYE

SEQ ID NO: 15920 - protein, 9 aa, Artificial
  helical interface sequence
TCPCYYKYS

SEQ ID NO: 15921 - protein, 9 aa, Artificial
  helical interface sequence
TCPCYYKYS

SEQ ID NO: 15922 - protein, 13 aa, Artificial
  helical interface sequence
TVALREIRRYQKS

SEQ ID NO: 15923 - protein, 22 aa, Artificial
  helical interface sequence
SHCWLRDMVIQLSLSLTTLLDK

SEQ ID NO: 15924 - protein, 11 aa, Artificial
  helical interface sequence
TKELGTVMRSL

SEQ ID NO: 15925 - protein, 11 aa, Artificial
  helical interface sequence
EAELQDMINEV

SEQ ID NO: 15926 - protein, 11 aa, Artificial
  helical interface sequence
KSQLIDKIAAG

SEQ ID NO: 15927 - protein, 9 aa, Artificial
  helical interface sequence
KKWIQKVID

SEQ ID NO: 15928 - protein, 8 aa, Artificial
  helical interface sequence
WPAVALHL

SEQ ID NO: 15929 - protein, 5 aa, Artificial
  helical interface sequence
IVEQC

SEQ ID NO: 15930 - protein, 7 aa, Artificial
  helical interface sequence
LYQLENY

SEQ ID NO: 15931 - protein, 7 aa, Artificial
  helical interface sequence
LYQLENY

SEQ ID NO: 15932 - protein, 7 aa, Artificial
  helical interface sequence
LYQLENY

SEQ ID NO: 15933 - protein, 5 aa, Artificial
  helical interface sequence
IVEQC

SEQ ID NO: 15934 - protein, 7 aa, Artificial
  helical interface sequence
LYQLENY

SEQ ID NO: 15935 - protein, 10 aa, Artificial
  helical interface sequence
EMELIHLVES

SEQ ID NO: 15936 - protein, 9 aa, Artificial
  helical interface sequence
PGGKTVRRS

SEQ ID NO: 15937 - protein, 21 aa, Artificial
  helical interface sequence
RRKAARLVAAKCTLAARVDSF

SEQ ID NO: 15938 - protein, 8 aa, Artificial
  helical interface sequence
EEEEEVRR

SEQ ID NO: 15939 - protein, 8 aa, Artificial
  helical interface sequence
KSWYEIER

SEQ ID NO: 15940 - protein, 9 aa, Artificial
  helical interface sequence
NVEELLRRI

SEQ ID NO: 15941 - protein, 12 aa, Artificial
  helical interface sequence
SVWIGGSILASL

SEQ ID NO: 15942 - protein, 14 aa, Artificial
  helical interface sequence
AFLQKIEALVKDMQ

SEQ ID NO: 15943 - protein, 9 aa, Artificial
  helical interface sequence
GKYAKEKED

SEQ ID NO: 15944 - protein, 13 aa, Artificial
  helical interface sequence
RIGRNFLRCWHGR

SEQ ID NO: 15945 - protein, 10 aa, Artificial
  helical interface sequence
VKQASHLLKY

SEQ ID NO: 15946 - protein, 16 aa, Artificial
  helical interface sequence
RYEIARVISARALQLA

SEQ ID NO: 15947 - protein, 11 aa, Artificial
  helical interface sequence
EEAIAEAKEIM

SEQ ID NO: 15948 - protein, 6 aa, Artificial
  helical interface sequence
INEVIH

SEQ ID NO: 15949 - protein, 5 aa, Artificial
  helical interface sequence
LQRTY

SEQ ID NO: 15950 - protein, 11 aa, Artificial
  helical interface sequence
KSLSRVMIHVF

SEQ ID NO: 15951 - protein, 8 aa, Artificial
  helical interface sequence
KEAEVKNT

SEQ ID NO: 15952 - protein, 31 aa, Artificial; identical to SEQ ID NO: 852
  helical interface sequence

SEQ ID NO: 15953 - protein, 11 aa, Artificial
  helical interface sequence
DNERSDIFDAM

SEQ ID NO: 15954 - protein, 9 aa, Artificial
  helical interface sequence
VFYLHSRLL

SEQ ID NO: 15955 - protein, 9 aa, Artificial
  helical interface sequence
VFYLHSRLL

SEQ ID NO: 15956 - protein, 11 aa, Artificial
  helical interface sequence
EELISQAQVVL

SEQ ID NO: 15957 - protein, 11 aa, Artificial
  helical interface sequence
EELISQAQVVL

SEQ ID NO: 15958 - protein, 11 aa, Artificial
  helical interface sequence
VNLAVNNLLSR

SEQ ID NO: 15959 - protein, 6 aa, Artificial
  helical interface sequence
SEELKE

SEQ ID NO: 15960 - protein, 7 aa, Artificial
  helical interface sequence
SVDLRQL

SEQ ID NO: 15961 - protein, 7 aa, Artificial
  helical interface sequence
EISARQL

SEQ ID NO: 15962 - protein, 17 aa, Artificial
  helical interface sequence
QMSFWGATVITGLFGAI

SEQ ID NO: 15963 - protein, 17 aa, Artificial
  helical interface sequence
QMSFWGATVITGLFGAI

SEQ ID NO: 15964 - protein, 29 aa, Artificial
  helical interface sequence
RRDFLYYATAGAGAVATGAAVWPLINQMN

SEQ ID NO: 15965 - protein, 29 aa, Artificial
  helical interface sequence
RRDFLYYATAGAGAVATGAAVWPLINQMN

SEQ ID NO: 15966 - protein, 17 aa, Artificial
  helical interface sequence
QMSFWGATVITGLFGAI

SEQ ID NO: 15967 - protein, 29 aa, Artificial
  helical interface sequence
RRDFLYYATAGAGAVATGAAVWPLINQMN

SEQ ID NO: 15968 - protein, 33 aa, Artificial
  helical interface sequence
NATLNRFFSLHYLLPFVIAALVAIHIWAFHSTG

SEQ ID NO: 15969 - protein, 17 aa, Artificial
  helical interface sequence
QMSFWGATVITGLFGAI

SEQ ID NO: 15970 - protein, 33 aa, Artificial; identical to SEQ ID NO: 15968
  helical interface sequence

SEQ ID NO: 15971 - protein, 16 aa, Artificial
  helical interface sequence
VADCGAEALARLLIVY

SEQ ID NO: 15972 - protein, 15 aa, Artificial
  helical interface sequence
FRLLGDILIIVLAAH

SEQ ID NO: 15973 - protein, 7 aa, Artificial
  helical interface sequence
DEQLKSG

SEQ ID NO: 15974 - protein, 14 aa, Artificial
  helical interface sequence
FLDLCAMLVCKLFS

SEQ ID NO: 15975 - protein, 10 aa, Artificial
  helical interface sequence
EDLDVASRFL

SEQ ID NO: 15976 - protein, 8 aa, Artificial
  helical interface sequence
VEELMKLG

SEQ ID NO: 15977 - protein, 15 aa, Artificial
  helical interface sequence
KEEMKMVWETQKIFN

SEQ ID NO: 15978 - protein, 18 aa, Artificial
  helical interface sequence
MSAFWYAVRTAVINAASG

SEQ ID NO: 15979 - protein, 9 aa, Artificial
  helical interface sequence
FERAQEVLL

SEQ ID NO: 15980 - protein, 13 aa, Artificial
  helical interface sequence
VLFPLVCTIAIAF

SEQ ID NO: 15981 - protein, 16 aa, Artificial
  helical interface sequence
SLVALYALFDRLGEYI

SEQ ID NO: 15982 - protein, 20 aa, Artificial
  helical interface sequence
PENFRLLGNVLVIVLSHHFG

SEQ ID NO: 15983 - protein, 5 aa, Artificial
  helical interface sequence
LQHYK

SEQ ID NO: 15984 - protein, 16 aa, Artificial
  helical interface sequence
MSDLKGTLELVAKKLF

SEQ ID NO: 15985 - protein, 18 aa, Artificial
  helical interface sequence
ENFKLLGNVLVVVLARHH

SEQ ID NO: 15986 - protein, 19 aa, Artificial
  helical interface sequence
PAVHASLDKFLANVSTVLT

SEQ ID NO: 15987 - protein, 19 aa, Artificial
  helical interface sequence
PENFKLLGNVLVVVLARHH

SEQ ID NO: 15988 - protein, 12 aa, Artificial
  helical interface sequence
PLTDAVSTADSQ

SEQ ID NO: 15989 - protein, 9 aa, Artificial
  helical interface sequence
FQAISDVIG

SEQ ID NO: 15990 - protein, 7 aa, Artificial
  helical interface sequence
SEQLTSG

SEQ ID NO: 15991 - protein, 10 aa, Artificial
  helical interface sequence
IGEFDTLVRK

SEQ ID NO: 15992 - protein, 7 aa, Artificial
  helical interface sequence
PPCILNN

SEQ ID NO: 15993 - protein, 7 aa, Artificial
  helical interface sequence
PPCILNN

SEQ ID NO: 15994 - protein, 7 aa, Artificial
  helical interface sequence
PPCILNN

SEQ ID NO: 15995 - protein, 7 aa, Artificial
  helical interface sequence
PPCILNN

SEQ ID NO: 15996 - protein, 7 aa, Artificial
  helical interface sequence
SEQLTSG

SEQ ID NO: 15997 - protein, 16 aa, Artificial
  helical interface sequence
AKEQRILAKTIKRARI

SEQ ID NO: 15998 - protein, 8 aa, Artificial
  helical interface sequence
ITEYRKRH

SEQ ID NO: 15999 - protein, 28 aa, Artificial
  helical interface sequence
SEHYDVARGVQKILQDYKSLQDIIAILG

SEQ ID NO: 16000 - protein, 10 aa, Artificial
  helical interface sequence
FGDASVIALE

SEQ ID NO: 16001 - protein, 13 aa, Artificial
  helical interface sequence
GQLMGEIAKATFM

SEQ ID NO: 16002 - protein, 12 aa, Artificial
  helical interface sequence
RWFLDKLVDEIG

SEQ ID NO: 16003 - protein, 14 aa, Artificial
  helical interface sequence
KLESLEAKNRALNE

SEQ ID NO: 16004 - protein, 7 aa, Artificial
  helical interface sequence
KLERLEK

SEQ ID NO: 16005 - protein, 14 aa, Artificial
  helical interface sequence
IYVKLEKLDIMIRL

SEQ ID NO: 16006 - protein, 5 aa, Artificial
  helical interface sequence
QNLLK

SEQ ID NO: 16007 - protein, 7 aa, Artificial
  helical interface sequence
NVAQCSG

SEQ ID NO: 16008 - protein, 25 aa, Artificial
  helical interface sequence
NRRMAACLRDMEIILRYVSYALLAG

SEQ ID NO: 16009 - protein, 14 aa, Artificial
  helical interface sequence
SNKRLDAVNAITGN

SEQ ID NO: 16010 - protein, 5 aa, Artificial
  helical interface sequence
KSYLD

SEQ ID NO: 16011 - protein, 10 aa, Artificial
  helical interface sequence
WEDGFIKKFE

SEQ ID NO: 16012 - protein, 5 aa, Artificial
  helical interface sequence
LMVLK

SEQ ID NO: 16013 - protein, 10 aa, Artificial
  helical interface sequence
ETAYGLLTAE

SEQ ID NO: 16014 - protein, 11 aa, Artificial
  helical interface sequence
NACGLFLKLHG

SEQ ID NO: 16015 - protein, 9 aa, Artificial
  helical interface sequence
DRLRPLSYP

SEQ ID NO: 16016 - protein, 13 aa, Artificial
  helical interface sequence
YAFKLLIQELMSM

SEQ ID NO: 16017 - protein, 10 aa, Artificial
  helical interface sequence
HFNEVFISLW

SEQ ID NO: 16018 - protein, 16 aa, Artificial
  helical interface sequence
RTSQSGYMQRRLINAL

SEQ ID NO: 16019 - protein, 6 aa, Artificial
  helical interface sequence
PDEIRK

SEQ ID NO: 16020 - protein, 27 aa, Artificial
  helical interface sequence
VETQVAELIGTNAIAPFLLTMSFAQRQ

SEQ ID NO: 16021 - protein, 24 aa, Artificial
  helical interface sequence
FKKMSEAKYQLQKIYNEIDEALKS

SEQ ID NO: 16022 - protein, 15 aa, Artificial
  helical interface sequence
TSTGKKVMASASSSS

SEQ ID NO: 16023 - protein, 21 aa, Artificial
  helical interface sequence
LRINKRILALCMGNHELYMRR

SEQ ID NO: 16024 - protein, 34 aa, Artificial; identical to SEQ ID NO: 2175
  helical interface sequence

SEQ ID NO: 16025 - protein, 31 aa, Artificial; identical to SEQ ID NO: 749
  helical interface sequence

SEQ ID NO: 16026 - protein, 20 aa, Artificial
  helical interface sequence
ASIHDTVENLIILANNSLSS

SEQ ID NO: 16027 - protein, 6 aa, Artificial
  helical interface sequence
SEQLTS

SEQ ID NO: 16028 - protein, 10 aa, Artificial
  helical interface sequence
ASIIYDALVS

SEQ ID NO: 16029 - protein, 6 aa, Artificial
  helical interface sequence
WDFAKD

SEQ ID NO: 16030 - protein, 20 aa, Artificial
  helical interface sequence
ISDMQHIERLLKDLVTENAY

SEQ ID NO: 16031 - protein, 6 aa, Artificial
  helical interface sequence
WDFAKD

SEQ ID NO: 16032 - protein, 18 aa, Artificial
  helical interface sequence
PSYIFEYLATVMYQRRSK

SEQ ID NO: 16033 - protein, 9 aa, Artificial
  helical interface sequence
PEEVEEVIG

SEQ ID NO: 16034 - protein, 10 aa, Artificial
  helical interface sequence
RDASTLKPML

SEQ ID NO: 16035 - protein, 8 aa, Artificial
  helical interface sequence
LADIAARE

SEQ ID NO: 16036 - protein, 6 aa, Artificial
  helical interface sequence
RELRDR

SEQ ID NO: 16037 - protein, 9 aa, Artificial
  helical interface sequence
YYARKRLVI

SEQ ID NO: 16038 - protein, 17 aa, Artificial
  helical interface sequence
VDTRQKQLAAWCSLVLS

SEQ ID NO: 16039 - protein, 19 aa, Artificial
  helical interface sequence
RELAQQIQKVVMALGDYMG

SEQ ID NO: 16040 - protein, 7 aa, Artificial
  helical interface sequence
WVEQETY

SEQ ID NO: 16041 - protein, 20 aa, Artificial
  helical interface sequence
GPYQLIIFHFLLGASCYMGR

SEQ ID NO: 16042 - protein, 11 aa, Artificial
  helical interface sequence
HLISSAVLGFG

SEQ ID NO: 16043 - protein, 17 aa, Artificial
  helical interface sequence
ALVILSFVMVIGVPVAY

SEQ ID NO: 16044 - protein, 17 aa, Artificial
  helical interface sequence
TLAVPTIFFLGAIAAMQ

SEQ ID NO: 16045 - protein, 16 aa, Artificial
  helical interface sequence
SLYLGLLLILVLALLF

SEQ ID NO: 16046 - protein, 15 aa, Artificial
  helical interface sequence
LVPSVFLIILYVQTE

SEQ ID NO: 16047 - protein, 16 aa, Artificial
  helical interface sequence
KANREKMTQIMFETFN

SEQ ID NO: 16048 - protein, 19 aa, Artificial
  helical interface sequence
PANFKILSHNLLVVLAQQF

SEQ ID NO: 16049 - protein, 7 aa, Artificial
  helical interface sequence
GLFYSIF

SEQ ID NO: 16050 - protein, 15 aa, Artificial
  helical interface sequence
HASDVLLNLNRLRSR

SEQ ID NO: 16051 - protein, 16 aa, Artificial
  helical interface sequence
NLYGDILSDLNSGLSA

SEQ ID NO: 16052 - protein, 16 aa, Artificial
  helical interface sequence
NLYGDILSDLNSGLSA

SEQ ID NO: 16053 - protein, 15 aa, Artificial
  helical interface sequence
SMYGTILGNIGAALI

SEQ ID NO: 16054 - protein, 11 aa, Artificial
  helical interface sequence
QHIYSMIIRRY

SEQ ID NO: 16055 - protein, 16 aa, Artificial
  helical interface sequence
ITLQEIIKTLNSLTEQ

SEQ ID NO: 16056 - protein, 22 aa, Artificial
  helical interface sequence
EELVAEAHNLCTLLENAIQDTV

SEQ ID NO: 16057 - protein, 16 aa, Artificial
  helical interface sequence
PLESAINVLEMIKTEF

SEQ ID NO: 16058 - protein, 6 aa, Artificial
  helical interface sequence
DYQIES

SEQ ID NO: 16059 - protein, 15 aa, Artificial
  helical interface sequence
EEQIAEFKEAFSLFD

SEQ ID NO: 16060 - protein, 12 aa, Artificial
  helical interface sequence
DEEVDEMIREAD

SEQ ID NO: 16061 - protein, 19 aa, Artificial
  helical interface sequence
GPEASQAQAMTFLIRDQKL

SEQ ID NO: 16062 - protein, 12 aa, Artificial
  helical interface sequence
LLCAIHGATVEN

SEQ ID NO: 16063 - protein, 6 aa, Artificial
  helical interface sequence
SEQLTS

SEQ ID NO: 16064 - protein, 13 aa, Artificial
  helical interface sequence
AKALQIIKLAELY

SEQ ID NO: 16065 - protein, 5 aa, Artificial
  helical interface sequence
EAEIS

SEQ ID NO: 16066 - protein, 22 aa, Artificial
  helical interface sequence
VGDAQVLVRYMKAELELYRLQR

SEQ ID NO: 16067 - protein, 22 aa, Artificial
  helical interface sequence
VGDAQVLVRYMKAELELYRLQR

SEQ ID NO: 16068 - protein, 5 aa, Artificial
  helical interface sequence
PHSSK

SEQ ID NO: 16069 - protein, 13 aa, Artificial
  helical interface sequence
WQEAIPMMAKACI

SEQ ID NO: 16070 - protein, 13 aa, Artificial
  helical interface sequence
KFKKFYAEFESLM

SEQ ID NO: 16071 - protein, 7 aa, Artificial
  helical interface sequence
DEQLKSG

SEQ ID NO: 16072 - protein, 7 aa, Artificial
  helical interface sequence
DEQLKSG

SEQ ID NO: 16073 - protein, 8 aa, Artificial
  helical interface sequence
LADLVGFH

SEQ ID NO: 16074 - protein, 6 aa, Artificial
  helical interface sequence
SEQLTS

SEQ ID NO: 16075 - protein, 17 aa, Artificial
  helical interface sequence
TQVLQYIYSHIYVKYVS

SEQ ID NO: 16076 - protein, 14 aa, Artificial
  helical interface sequence
NILCGVLKGSLEMV

SEQ ID NO: 16077 - protein, 6 aa, Artificial
  helical interface sequence
SEQLTS

SEQ ID NO: 16078 - protein, 19 aa, Artificial
  helical interface sequence
PWEVTDLQPQLKVDKAVAF

SEQ ID NO: 16079 - protein, 23 aa, Artificial
  helical interface sequence
WNFGSLLAVCLMTQILTGLLLAM

SEQ ID NO: 16080 - protein, 29 aa, Artificial
  helical interface sequence
GWLIRNLHANGASFFFICIFLHIGRGLYY

SEQ ID NO: 16081 - protein, 22 aa, Artificial
  helical interface sequence
KLLGVITMFAAILVLLVLPFTD

SEQ ID NO: 16082 - protein, 33 aa, Artificial; identical to SEQ ID NO: 12926
  helical interface sequence

SEQ ID NO: 16083 - protein, 22 aa, Artificial
  helical interface sequence
KLLGVITMFAAILVLLVLPFTD

SEQ ID NO: 16084 - protein, 23 aa, Artificial
  helical interface sequence
AVATLCDLFDREIVVTISWAKSI

SEQ ID NO: 16085 - protein, 18 aa, Artificial
  helical interface sequence
KRAVRRLRTACERAKRTL

SEQ ID NO: 16086 - protein, 5 aa, Artificial
  helical interface sequence
ECVSK

SEQ ID NO: 16087 - protein, 9 aa, Artificial
  helical interface sequence
AIAVREARK

SEQ ID NO: 16088 - protein, 7 aa, Artificial
  helical interface sequence
EVSALLG

SEQ ID NO: 16089 - protein, 5 aa, Artificial
  helical interface sequence
LVLPG

SEQ ID NO: 16090 - protein, 14 aa, Artificial
  helical interface sequence
ATGTEILKNLVLPG

SEQ ID NO: 16091 - protein, 13 aa, Artificial
  helical interface sequence
IIARRWINGMLIS

SEQ ID NO: 16092 - protein, 12 aa, Artificial
  helical interface sequence
VFELKRIVEGIL

SEQ ID NO: 16093 - protein, 32 aa, Artificial; identical to SEQ ID NO: 7030
  helical interface sequence

SEQ ID NO: 16094 - protein, 20 aa, Artificial
  helical interface sequence
PENFRLLGDILVIILAAHFG

SEQ ID NO: 16095 - protein, 20 aa, Artificial
  helical interface sequence
PENFRLLGDILVIILAAHFG

SEQ ID NO: 16096 - protein, 26 aa, Artificial
  helical interface sequence
VEFKKETYYMFDEMMRRINDTIANYV

SEQ ID NO: 16097 - protein, 7 aa, Artificial
  helical interface sequence
TVLSTMS

SEQ ID NO: 16098 - protein, 7 aa, Artificial
  helical interface sequence
TVLSTMS

SEQ ID NO: 16099 - protein, 28 aa, Artificial
  helical interface sequence
FILITVLTLVAGTMFLVWIADRITEKGI

SEQ ID NO: 16100 - protein, 28 aa, Artificial
  helical interface sequence
FILITVLTLVAGTMFLVWIADRITEKGI

SEQ ID NO: 16101 - protein, 10 aa, Artificial
  helical interface sequence
VEQMHEDIIS

SEQ ID NO: 16102 - protein, 22 aa, Artificial
  helical interface sequence
EEENEGIVQLRILRTQEAIIQI

SEQ ID NO: 16103 - protein, 12 aa, Artificial
  helical interface sequence
KNDIRATFDSLG

SEQ ID NO: 16104 - protein, 18 aa, Artificial
  helical interface sequence
GHLWNVMITGHGILMMFF

SEQ ID NO: 16105 - protein, 10 aa, Artificial
  helical interface sequence
FNLKEQYEIY

SEQ ID NO: 16106 - protein, 11 aa, Artificial
  helical interface sequence
TKELGTVMRSL

SEQ ID NO: 16107 - protein, 19 aa, Artificial
  helical interface sequence
FRNTLHFHIKASKAYMHQR

SEQ ID NO: 16108 - protein, 8 aa, Artificial
  helical interface sequence
EIERILVR

SEQ ID NO: 16109 - protein, 29 aa, Artificial
  helical interface sequence
PEYWDRETQISKTNTQTYRENLRTALRYY

SEQ ID NO: 16110 - protein, 5 aa, Artificial
  helical interface sequence
REFLK

SEQ ID NO: 16111 - protein, 9 aa, Artificial
  helical interface sequence
EGEQCSAAH

SEQ ID NO: 16112 - protein, 18 aa, Artificial
  helical interface sequence
QNIRLTSETQLKKLSNDN

SEQ ID NO: 16113 - protein, 12 aa, Artificial
  helical interface sequence
KPFLWLARKLIG

SEQ ID NO: 16114 - protein, 16 aa, Artificial
  helical interface sequence
MALKRIHKELNDLARD

SEQ ID NO: 16115 - protein, 5 aa, Artificial
  helical interface sequence
EKTFG

SEQ ID NO: 16116 - protein, 15 aa, Artificial
  helical interface sequence
RELAQQIQKVVMALG

SEQ ID NO: 16117 - protein, 23 aa, Artificial
  helical interface sequence
SSALRGTVNSYLRWIKAAIDVIE

SEQ ID NO: 16118 - protein, 11 aa, Artificial
  helical interface sequence
HRKIYTMIYRN

SEQ ID NO: 16119 - protein, 11 aa, Artificial
  helical interface sequence
ENVLSSDILDL

SEQ ID NO: 16120 - protein, 9 aa, Artificial
  helical interface sequence
EIGIEMKFK

SEQ ID NO: 16121 - protein, 8 aa, Artificial
  helical interface sequence
PEKIRNAC

SEQ ID NO: 16122 - protein, 8 aa, Artificial
  helical interface sequence
PEKIRNAC

SEQ ID NO: 16123 - protein, 12 aa, Artificial
  helical interface sequence
DIRILRDIEQYY

SEQ ID NO: 16124 - protein, 12 aa, Artificial
  helical interface sequence
VKDIIFAIKKTL

SEQ ID NO: 16125 - protein, 7 aa, Artificial
  helical interface sequence
FNFSMQA

SEQ ID NO: 16126 - protein, 13 aa, Artificial
  helical interface sequence
GQIFEAYNMAALW

SEQ ID NO: 16127 - protein, 7 aa, Artificial
  helical interface sequence
FNFSMQA

SEQ ID NO: 16128 - protein, 17 aa, Artificial
  helical interface sequence
AQVPLGAGIALACKYNG

SEQ ID NO: 16129 - protein, 15 aa, Artificial
  helical interface sequence
SDVDLSKYITTIAGV

SEQ ID NO: 16130 - protein, 6 aa, Artificial
  helical interface sequence
SAEYLQ

SEQ ID NO: 16131 - protein, 14 aa, Artificial
  helical interface sequence
KAVYRVLLILPYAV

SEQ ID NO: 16132 - protein, 14 aa, Artificial
  helical interface sequence
KAVYRVLLILPYAV

SEQ ID NO: 16133 - protein, 18 aa, Artificial
  helical interface sequence
KAVDWWALGVLIYEMAAG

SEQ ID NO: 16134 - protein, 13 aa, Artificial
  helical interface sequence
PAGEVLLQEISYA

SEQ ID NO: 16135 - protein, 15 aa, Artificial
  helical interface sequence
PFAAQVAAERCADAV

SEQ ID NO: 16136 - protein, 15 aa, Artificial
  helical interface sequence
TREGNDLYREMKETG

SEQ ID NO: 16137 - protein, 8 aa, Artificial
  helical interface sequence
QDIIAILG

SEQ ID NO: 16138 - protein, 22 aa, Artificial
  helical interface sequence
VPRDLFEYTLANQMLTAMAQGY

SEQ ID NO: 16139 - protein, 18 aa, Artificial
  helical interface sequence
DFHDSNVKNLYDKVRLQL

SEQ ID NO: 16140 - protein, 16 aa, Artificial
  helical interface sequence
NYELISNELKARLLQE

SEQ ID NO: 16141 - protein, 11 aa, Artificial
  helical interface sequence
EEIREAFRVFD

SEQ ID NO: 16142 - protein, 16 aa, Artificial
  helical interface sequence
WAAIAAKHFFDDIITG

SEQ ID NO: 16143 - protein, 11 aa, Artificial
  helical interface sequence
VEPVIETAEID

SEQ ID NO: 16144 - protein, 5 aa, Artificial
  helical interface sequence
YELTR

SEQ ID NO: 16145 - protein, 7 aa, Artificial
  helical interface sequence
IVDRFLA

SEQ ID NO: 16146 - protein, 8 aa, Artificial
  helical interface sequence
SEGLREAF

SEQ ID NO: 16147 - protein, 29 aa, Artificial
  helical interface sequence
PEYWDGETRKVKAHSQTHRVDLGTLRGYY

SEQ ID NO: 16148 - protein, 22 aa, Artificial
  helical interface sequence
TEIFKICLEYWNHLAAELYRES

SEQ ID NO: 16149 - protein, 23 aa, Artificial
  helical interface sequence
PQVCAKLFGNIQKVVNFWLLHNG

SEQ ID NO: 16150 - protein, 14 aa, Artificial
  helical interface sequence
WQMLEMLKPCVEDG

SEQ ID NO: 16151 - protein, 11 aa, Artificial
  helical interface sequence
DEFIAHRLGLI

SEQ ID NO: 16152 - protein, 7 aa, Artificial
  helical interface sequence
REKALMN

SEQ ID NO: 16153 - protein, 7 aa, Artificial
  helical interface sequence
REKALMN

SEQ ID NO: 16154 - protein, 44 aa, Artificial; identical to SEQ ID NO: 1563
  helical interface sequence

SEQ ID NO: 16155 - protein, 8 aa, Artificial
  helical interface sequence
PELMRQAW

SEQ ID NO: 16156 - protein, 10 aa, Artificial
  helical interface sequence
KEVFAQFRAN

SEQ ID NO: 16157 - protein, 10 aa, Artificial
  helical interface sequence
VVEWLGWFED

SEQ ID NO: 16158 - protein, 11 aa, Artificial
  helical interface sequence
VVEWLGWFEDQ

SEQ ID NO: 16159 - protein, 13 aa, Artificial
  helical interface sequence
HTLGNLIAGTLRR

SEQ ID NO: 16160 - protein, 5 aa, Artificial
  helical interface sequence
EIKGL

SEQ ID NO: 16161 - protein, 5 aa, Artificial
  helical interface sequence
RLLDN

SEQ ID NO: 16162 - protein, 7 aa, Artificial
  helical interface sequence
IRRASML

SEQ ID NO: 16163 - protein, 8 aa, Artificial
  helical interface sequence
EDVRAILA

SEQ ID NO: 16164 - protein, 11 aa, Artificial
  helical interface sequence
TLFCCLLRSRL

SEQ ID NO: 16165 - protein, 7 aa, Artificial
  helical interface sequence
LIEKFLR

SEQ ID NO: 16166 - protein, 11 aa, Artificial
  helical interface sequence
TLFCCLLRSRL

SEQ ID NO: 16167 - protein, 6 aa, Artificial
  helical interface sequence
QSSIDR

SEQ ID NO: 16168 - protein, 9 aa, Artificial
  helical interface sequence
PFEVAQLGS

SEQ ID NO: 16169 - protein, 7 aa, Artificial
  helical interface sequence
ADEAKTL

SEQ ID NO: 16170 - protein, 10 aa, Artificial
  helical interface sequence
YCCRRMILTH

SEQ ID NO: 16171 - protein, 15 aa, Artificial
  helical interface sequence
GQEFRVQTMKWYAMF

SEQ ID NO: 16172 - protein, 17 aa, Artificial
  helical interface sequence
PTQLPQYLQTEKLARTQ

SEQ ID NO: 16173 - protein, 19 aa, Artificial
  helical interface sequence
YPEAVAIITSFIMEGARDG

SEQ ID NO: 16174 - protein, 9 aa, Artificial
  helical interface sequence
IQVERDKLN

SEQ ID NO: 16175 - protein, 8 aa, Artificial
  helical interface sequence
IQVERDKL

SEQ ID NO: 16176 - protein, 6 aa, Artificial
  helical interface sequence
SEELQA

SEQ ID NO: 16177 - protein, 14 aa, Artificial
  helical interface sequence
EYALAAYRKIARDI

SEQ ID NO: 16178 - protein, 8 aa, Artificial
  helical interface sequence
RPVCKAST

SEQ ID NO: 16179 - protein, 19 aa, Artificial
  helical interface sequence
PVNFKLLSHCLLVTLAAHL

SEQ ID NO: 16180 - protein, 19 aa, Artificial
  helical interface sequence
PVNFKLLSHCLLVTLAAHL

SEQ ID NO: 16181 - protein, 16 aa, Artificial
  helical interface sequence
EENIDFWISCEEYKKI

SEQ ID NO: 16182 - protein, 11 aa, Artificial
  helical interface sequence
ENHNGVFTTAG

SEQ ID NO: 16183 - protein, 10 aa, Artificial
  helical interface sequence
VGRVHRLLRK

SEQ ID NO: 16184 - protein, 13 aa, Artificial
  helical interface sequence
GEALATLVVNTMR

SEQ ID NO: 16185 - protein, 6 aa, Artificial
  helical interface sequence
DEEART

SEQ ID NO: 16186 - protein, 25 aa, Artificial
  helical interface sequence
TRRYAACIRDLDYYLRYATYAMLAG

SEQ ID NO: 16187 - protein, 12 aa, Artificial
  helical interface sequence
SDLQSLKSFIND

SEQ ID NO: 16188 - protein, 5 aa, Artificial
  helical interface sequence
LSQIT

SEQ ID NO: 16189 - protein, 16 aa, Artificial
  helical interface sequence
WRHDVEVLKAWVAKAT

SEQ ID NO: 16190 - protein, 5 aa, Artificial
  helical interface sequence
FDRTM

SEQ ID NO: 16191 - protein, 25 aa, Artificial
  helical interface sequence
VAYLRALSLEVAEEIARLEAEVFRL

SEQ ID NO: 16192 - protein, 6 aa, Artificial
  helical interface sequence
YNRIRS

SEQ ID NO: 16193 - protein, 22 aa, Artificial
  helical interface sequence
PLSQCLFWALVADLLTLTWIGG

SEQ ID NO: 16194 - protein, 33 aa, Artificial; identical to SEQ ID NO: 9034
  helical interface sequence

SEQ ID NO: 16195 - protein, 10 aa, Artificial
  helical interface sequence
ALEKEVESMG

SEQ ID NO: 16196 - protein, 20 aa, Artificial
  helical interface sequence
DSQIEKERDVILQELQENDT

SEQ ID NO: 16197 - protein, 13 aa, Artificial
  helical interface sequence
EEQLNRYEMYRRS

SEQ ID NO: 16198 - protein, 9 aa, Artificial
  helical interface sequence
KAAIKRLIQ

SEQ ID NO: 16199 - protein, 14 aa, Artificial
  helical interface sequence
AGERIVDIIATDIQ

SEQ ID NO: 16200 - protein, 17 aa, Artificial
  helical interface sequence
TFAWYLSGLVFKWLKAN

SEQ ID NO: 16201 - protein, 17 aa, Artificial
  helical interface sequence
TFAWYLSGLVFKWLKAN

SEQ ID NO: 16202 - protein, 13 aa, Artificial
  helical interface sequence
KNWKKAHNILLPS

SEQ ID NO: 16203 - protein, 16 aa, Artificial
  helical interface sequence
TAEGTARDLADIAMSK

SEQ ID NO: 16204 - protein, 9 aa, Artificial
  helical interface sequence
QAVLSLYAS

SEQ ID NO: 16205 - protein, 11 aa, Artificial
  helical interface sequence
RKEFVNLYSDY

SEQ ID NO: 16206 - protein, 12 aa, Artificial
  helical interface sequence
AAELRHVMTNLG

SEQ ID NO: 16207 - protein, 9 aa, Artificial
  helical interface sequence
NTNCKKYWG

SEQ ID NO: 16208 - protein, 12 aa, Artificial
  helical interface sequence
FSAADFVALDFL

SEQ ID NO: 16209 - protein, 22 aa, Artificial
  helical interface sequence
PQGGLQNIATGKHNLEILTKRS

SEQ ID NO: 16210 - protein, 22 aa, Artificial
  helical interface sequence
PQGGLQNIATGKHNLEILTKRS

SEQ ID NO: 16211 - protein, 6 aa, Artificial
  helical interface sequence
DEQLKS

SEQ ID NO: 16212 - protein, 8 aa, Artificial
  helical interface sequence
YDEIEQTL

SEQ ID NO: 16213 - protein, 8 aa, Artificial
  helical interface sequence
GEEVEELL

SEQ ID NO: 16214 - protein, 14 aa, Artificial
  helical interface sequence
GKNLYDKVCGHCHK

SEQ ID NO: 16215 - protein, 11 aa, Artificial
  helical interface sequence
GLEVVKALAQG

SEQ ID NO: 16216 - protein, 5 aa, Artificial
  helical interface sequence
LANKH

SEQ ID NO: 16217 - protein, 11 aa, Artificial
  helical interface sequence
LIDHFIARYGI

SEQ ID NO: 16218 - protein, 7 aa, Artificial
  helical interface sequence
RFAKLLL

SEQ ID NO: 16219 - protein, 6 aa, Artificial
  helical interface sequence
SEQLTS

SEQ ID NO: 16220 - protein, 11 aa, Artificial
  helical interface sequence
DVAENRRKYMN

SEQ ID NO: 16221 - protein, 11 aa, Artificial
  helical interface sequence
DVAENRRKYMN

SEQ ID NO: 16222 - protein, 12 aa, Artificial
  helical interface sequence
KVEGTAVGFSFF

SEQ ID NO: 16223 - protein, 14 aa, Artificial
  helical interface sequence
LQSKIAYLRRKMVS

SEQ ID NO: 16224 - protein, 14 aa, Artificial
  helical interface sequence
LQSKIAYLRRKMVS

SEQ ID NO: 16225 - protein, 14 aa, Artificial
  helical interface sequence
LQSKIAYLRRKMVS

SEQ ID NO: 16226 - protein, 5 aa, Artificial
  helical interface sequence
VASMI

SEQ ID NO: 16227 - protein, 5 aa, Artificial
  helical interface sequence
FYAWK

SEQ ID NO: 16228 - protein, 15 aa, Artificial
  helical interface sequence
YKAAVDLSHFLKEKG

SEQ ID NO: 16229 - protein, 11 aa, Artificial
  helical interface sequence
ATGQMLAAILG

SEQ ID NO: 16230 - protein, 11 aa, Artificial
  helical interface sequence
MMDCKKALTEA

SEQ ID NO: 16231 - protein, 9 aa, Artificial
  helical interface sequence
PVSIRKTAR

SEQ ID NO: 16232 - protein, 7 aa, Artificial
  helical interface sequence
SDFQCKD

SEQ ID NO: 16233 - protein, 6 aa, Artificial
  helical interface sequence
IENFLA

SEQ ID NO: 16234 - protein, 5 aa, Artificial
  helical interface sequence
TVEAC

SEQ ID NO: 16235 - protein, 12 aa, Artificial
  helical interface sequence
KSTTTGHLIYKC

SEQ ID NO: 16236 - protein, 12 aa, Artificial
  helical interface sequence
SREIQTAVRLLL

SEQ ID NO: 16237 - protein, 11 aa, Artificial
  helical interface sequence
AMDVVYALKRQ

SEQ ID NO: 16238 - protein, 12 aa, Artificial
  helical interface sequence
SREIQTAVRLLL

SEQ ID NO: 16239 - protein, 10 aa, Artificial
  helical interface sequence
RVALQAEKLD

SEQ ID NO: 16240 - protein, 6 aa, Artificial
  helical interface sequence
SEQLTS

SEQ ID NO: 16241 - protein, 7 aa, Artificial
  helical interface sequence
SEQLTSG

SEQ ID NO: 16242 - protein, 24 aa, Artificial
  helical interface sequence
LDDQVILLRAGWNELLIASFSHRS

SEQ ID NO: 16243 - protein, 23 aa, Artificial
  helical interface sequence
AADTEAVTQLIGSNIELHSLYTS

SEQ ID NO: 16244 - protein, 17 aa, Artificial
  helical interface sequence
RILIEKARVEAQSHRLT

SEQ ID NO: 16245 - protein, 11 aa, Artificial
  helical interface sequence
LIMPFLDNQVN

SEQ ID NO: 16246 - protein, 14 aa, Artificial
  helical interface sequence
YQVEYAFKATNQTN

SEQ ID NO: 16247 - protein, 22 aa, Artificial
  helical interface sequence
TADAEILINTARIHAQNYLKTY

SEQ ID NO: 16248 - protein, 17 aa, Artificial
  helical interface sequence
RILIEKARVEAQSHRLT

SEQ ID NO: 16249 - protein, 5 aa, Artificial
  helical interface sequence
LESYL

SEQ ID NO: 16250 - protein, 5 aa, Artificial
  helical interface sequence
LESYL

SEQ ID NO: 16251 - protein, 9 aa, Artificial
  helical interface sequence
LPELLKVSG

SEQ ID NO: 16252 - protein, 8 aa, Artificial
  helical interface sequence
PEEIRKTF

SEQ ID NO: 16253 - protein, 8 aa, Artificial
  helical interface sequence
KRWYRLAS

SEQ ID NO: 16254 - protein, 9 aa, Artificial
  helical interface sequence
VSTLHGILS

SEQ ID NO: 16255 - protein, 23 aa, Artificial
  helical interface sequence
AGDTVQFAEYIQANIQLYSIRED

SEQ ID NO: 16256 - protein, 18 aa, Artificial
  helical interface sequence
KEEAIKLASDAIQAGIWN

SEQ ID NO: 16257 - protein, 13 aa, Artificial
  helical interface sequence
ASLIMPFLDNQVN

SEQ ID NO: 16258 - protein, 22 aa, Artificial
  helical interface sequence
TADARSMIEHARTAAVTHNLYY

SEQ ID NO: 16259 - protein, 22 aa, Artificial
  helical interface sequence
AADTQAIADIVQYHLELYTSQY

SEQ ID NO: 16260 - protein, 22 aa, Artificial
  helical interface sequence
IPDGRHLVNRGREEAASFKKLY

SEQ ID NO: 16261 - protein, 19 aa, Artificial
  helical interface sequence
VEDALYLGKRSILAAAHRD

SEQ ID NO: 16262 - protein, 9 aa, Artificial
  helical interface sequence
EKARKDRNK

SEQ ID NO: 16263 - protein, 8 aa, Artificial
  helical interface sequence
IMEMAAEA

SEQ ID NO: 16264 - protein, 18 aa, Artificial
  helical interface sequence
TADAFTLFELFERKLEMH

SEQ ID NO: 16265 - protein, 13 aa, Artificial
  helical interface sequence
ADAFTLFELFERK

SEQ ID NO: 16266 - protein, 10 aa, Artificial
  helical interface sequence
PEIARRLLLR

SEQ ID NO: 16267 - protein, 9 aa, Artificial
  helical interface sequence
VIHDAARAG

SEQ ID NO: 16268 - protein, 11 aa, Artificial
  helical interface sequence
PSVAIARHVAG

SEQ ID NO: 16269 - protein, 5 aa, Artificial
  helical interface sequence
PYESQ

SEQ ID NO: 16270 - protein, 7 aa, Artificial
  helical interface sequence
LSQITNN

SEQ ID NO: 16271 - protein, 6 aa, Artificial
  helical interface sequence
SEQLTS

SEQ ID NO: 16272 - protein, 14 aa, Artificial
  helical interface sequence
SNKRLDVVNRITSN

SEQ ID NO: 16273 - protein, 17 aa, Artificial
  helical interface sequence
DAAVEANSYLDYAINAL

SEQ ID NO: 16274 - protein, 14 aa, Artificial
  helical interface sequence
SNKRLDVVNRITSN

SEQ ID NO: 16275 - protein, 14 aa, Artificial
  helical interface sequence
SNKRLDVVNRITSN

SEQ ID NO: 16276 - protein, 8 aa, Artificial
  helical interface sequence
REQVEAAV

SEQ ID NO: 16277 - protein, 30 aa, Artificial
  helical interface sequence
PTSVARQRLREDHSQLQAECERLRGLLRAM

SEQ ID NO: 16278 - protein, 10 aa, Artificial
  helical interface sequence
KSALTVQFVQ

SEQ ID NO: 16279 - protein, 16 aa, Artificial
  helical interface sequence
YDGFAIFARDMDMTLN

SEQ ID NO: 16280 - protein, 12 aa, Artificial
  helical interface sequence
SVWIGGSILASL

SEQ ID NO: 16281 - protein, 8 aa, Artificial
  helical interface sequence
GCSESVLR

SEQ ID NO: 16282 - protein, 13 aa, Artificial
  helical interface sequence
PHYFTQVFSDLKN

SEQ ID NO: 16283 - protein, 12 aa, Artificial
  helical interface sequence
RADAENAMRYIN

SEQ ID NO: 16284 - protein, 27 aa, Artificial
  helical interface sequence
KLRRYTTFSKRKTGIMKKAYELSTLTG

SEQ ID NO: 16285 - protein, 9 aa, Artificial
  helical interface sequence
VDIRKDLYA

SEQ ID NO: 16286 - protein, 14 aa, Artificial
  helical interface sequence
IEGRNAAYQAIIKG

SEQ ID NO: 16287 - protein, 11 aa, Artificial
  helical interface sequence
GRAMAETLELL

SEQ ID NO: 16288 - protein, 21 aa, Artificial
  helical interface sequence
PQVCAKLFGNIQKVVNFWLLH

SEQ ID NO: 16289 - protein, 13 aa, Artificial
  helical interface sequence
LAMANSLRRVMIA

SEQ ID NO: 16290 - protein, 14 aa, Artificial
  helical interface sequence
EVDTVCRHNYEIFD

SEQ ID NO: 16291 - protein, 17 aa, Artificial
  helical interface sequence
QVVVNKAAVMVHQLSKK

SEQ ID NO: 16292 - protein, 6 aa, Artificial
  helical interface sequence
DEQLKS

SEQ ID NO: 16293 - protein, 15 aa, Artificial
  helical interface sequence
VRRAIKQAVQRVMES

SEQ ID NO: 16294 - protein, 17 aa, Artificial
  helical interface sequence
GRRKAMAKSIAECGQDA

SEQ ID NO: 16295 - protein, 19 aa, Artificial
  helical interface sequence
CWAFSATGALEGQMFRKTG

SEQ ID NO: 16296 - protein, 13 aa, Artificial
  helical interface sequence
TVALREIRRFQKS

SEQ ID NO: 16297 - protein, 6 aa, Artificial
  helical interface sequence
DEQLKS

SEQ ID NO: 16298 - protein, 10 aa, Artificial
  helical interface sequence
PELAAACEVW

SEQ ID NO: 16299 - protein, 10 aa, Artificial
  helical interface sequence
PELAAACEVW

SEQ ID NO: 16300 - protein, 10 aa, Artificial
  helical interface sequence
PELAAACEVW

SEQ ID NO: 16301 - protein, 10 aa, Artificial
  helical interface sequence
PELAAACEVW

SEQ ID NO: 16302 - protein, 10 aa, Artificial
  helical interface sequence
PELAAACEVW

SEQ ID NO: 16303 - protein, 10 aa, Artificial
  helical interface sequence
PELAAACEVW

SEQ ID NO: 16304 - protein, 23 aa, Artificial
  helical interface sequence
TADSRSQVQRARYEAANWKYKYG

SEQ ID NO: 16305 - protein, 17 aa, Artificial
  helical interface sequence
PTAAANFTRRNLADCLR

SEQ ID NO: 16306 - protein, 11 aa, Artificial
  helical interface sequence
SLAAMAVFEDK

SEQ ID NO: 16307 - protein, 22 aa, Artificial
  helical interface sequence
AGDTVQFAEYIQKNVQLYKMRN

SEQ ID NO: 16308 - protein, 17 aa, Artificial
  helical interface sequence
FGVTLGNPLRRILLSSI

SEQ ID NO: 16309 - protein, 23 aa, Artificial
  helical interface sequence
MEKTARLLDALKYYGFTFSTTSG

SEQ ID NO: 16310 - protein, 21 aa, Artificial
  helical interface sequence
IQAGATANRVALEAMILARNE

SEQ ID NO: 16311 - protein, 18 aa, Artificial
  helical interface sequence
WRERYLFTMEAVNKASAA

SEQ ID NO: 16312 - protein, 14 aa, Artificial
  helical interface sequence
DEQIKKQIDYMISK

SEQ ID NO: 16313 - protein, 19 aa, Artificial
  helical interface sequence
VRPKFMAKAALFHIKETKH

SEQ ID NO: 16314 - protein, 12 aa, Artificial
  helical interface sequence
FPEFLTMMARKM

SEQ ID NO: 16315 - protein, 5 aa, Artificial
  helical interface sequence
ALFIA

SEQ ID NO: 16316 - protein, 18 aa, Artificial
  helical interface sequence
QLGVAGVFGGALFCAMHG

SEQ ID NO: 16317 - protein, 12 aa, Artificial
  helical interface sequence
EEELSDLFRMFD

SEQ ID NO: 16318 - protein, 8 aa, Artificial
  helical interface sequence
IYKAAVEQ

SEQ ID NO: 16319 - protein, 12 aa, Artificial
  helical interface sequence
EEELSDLFRMFD

SEQ ID NO: 16320 - protein, 27 aa, Artificial
  helical interface sequence
ANLGGLISGIALILVATACLAAYGLVS

SEQ ID NO: 16321 - protein, 19 aa, Artificial
  helical interface sequence
VEEVIKLVRDSFTSATERH

SEQ ID NO: 16322 - protein, 20 aa, Artificial
  helical interface sequence
PENFRLLGNMIVIVLGHHLG

SEQ ID NO: 16323 - protein, 20 aa, Artificial
  helical interface sequence
PENFRLLGNMIVIVLGHHLG

SEQ ID NO: 16324 - protein, 19 aa, Artificial
  helical interface sequence
PVNFKLLSHCLLVTLAARF

SEQ ID NO: 16325 - protein, 9 aa, Artificial
  helical interface sequence
FLQMLKMYF

SEQ ID NO: 16326 - protein, 5 aa, Artificial
  helical interface sequence
PGMLN

SEQ ID NO: 16327 - protein, 5 aa, Artificial
  helical interface sequence
PGMLN

SEQ ID NO: 16328 - protein, 17 aa, Artificial
  helical interface sequence
EKLLWTTSRVLKVLSVC

SEQ ID NO: 16329 - protein, 9 aa, Artificial
  helical interface sequence
HRAARIAAR

SEQ ID NO: 16330 - protein, 8 aa, Artificial
  helical interface sequence
VAEFVYIT

SEQ ID NO: 16331 - protein, 6 aa, Artificial
  helical interface sequence
PVTEKH

SEQ ID NO: 16332 - protein, 11 aa, Artificial
  helical interface sequence
LLGCIITSLTG

SEQ ID NO: 16333 - protein, 23 aa, Artificial
  helical interface sequence
PPVQAAYQKVVAGVANALAHKYH

SEQ ID NO: 16334 - protein, 16 aa, Artificial
  helical interface sequence
PVNFKLLSHCLLVTLA

SEQ ID NO: 16335 - protein, 19 aa, Artificial
  helical interface sequence
PENFRLLGNVLVCVLAHHF

SEQ ID NO: 16336 - protein, 19 aa, Artificial
  helical interface sequence
PENFRLLGNVLVCVLAHHF

SEQ ID NO: 16337 - protein, 18 aa, Artificial
  helical interface sequence
AHAGEYGAEALERMFLSF

SEQ ID NO: 16338 - protein, 12 aa, Artificial
  helical interface sequence
KPFLWLARKLIG

SEQ ID NO: 16339 - protein, 23 aa, Artificial
  helical interface sequence
LNDQVTLLKYGVYEAIFAMLSSV

SEQ ID NO: 16340 - protein, 6 aa, Artificial
  helical interface sequence
SEQLSS

SEQ ID NO: 16341 - protein, 13 aa, Artificial
  helical interface sequence
LLDALGYIKDNLA

SEQ ID NO: 16342 - protein, 28 aa, Artificial
  helical interface sequence
LSRLADNAWLRADRLNQLAFDTYQEFEE

SEQ ID NO: 16343 - protein, 28 aa, Artificial
  helical interface sequence
LSRLADNAWLRADRLNQLAFDTYQEFEE

SEQ ID NO: 16344 - protein, 13 aa, Artificial
  helical interface sequence
PEAWAGFVDFLQN

SEQ ID NO: 16345 - protein, 6 aa, Artificial
  helical interface sequence
DLLYAY

SEQ ID NO: 16346 - protein, 16 aa, Artificial
  helical interface sequence
FTEYKKKLAERLKAKL

SEQ ID NO: 16347 - protein, 7 aa, Artificial
  helical interface sequence
YMRIRSD

SEQ ID NO: 16348 - protein, 30 aa, Artificial; identical to SEQ ID NO: 7572
  helical interface sequence

SEQ ID NO: 16349 - protein, 31 aa, Artificial; identical to SEQ ID NO: 4717
  helical interface sequence

SEQ ID NO: 16350 - protein, 19 aa, Artificial
  helical interface sequence
PSSFENVKEKWVPEITHHC

SEQ ID NO: 16351 - protein, 5 aa, Artificial
  helical interface sequence
MEGIH

SEQ ID NO: 16352 - protein, 12 aa, Artificial
  helical interface sequence
TAAERAALFWRW

SEQ ID NO: 16353 - protein, 14 aa, Artificial
  helical interface sequence
GNKRLDAVNYIVSN

SEQ ID NO: 16354 - protein, 6 aa, Artificial
  helical interface sequence
TEQLAT

SEQ ID NO: 16355 - protein, 8 aa, Artificial
  helical interface sequence
KEDFRYRS

SEQ ID NO: 16356 - protein, 9 aa, Artificial
  helical interface sequence
GRPDAEYWN

SEQ ID NO: 16357 - protein, 6 aa, Artificial
  helical interface sequence
SEQLTS

SEQ ID NO: 16358 - protein, 11 aa, Artificial
  helical interface sequence
AMDVFVCTYFM

SEQ ID NO: 16359 - protein, 14 aa, Artificial
  helical interface sequence
PVSISMSLAMLSLG

SEQ ID NO: 16360 - protein, 14 aa, Artificial
  helical interface sequence
ATRLQDLRVTFHRV

SEQ ID NO: 16361 - protein, 7 aa, Artificial
  helical interface sequence
EFKEAFS

SEQ ID NO: 16362 - protein, 10 aa, Artificial
  helical interface sequence
QKEIENRYKE

SEQ ID NO: 16363 - protein, 46 aa, Artificial; identical to SEQ ID NO: 1500
  helical interface sequence

SEQ ID NO: 16364 - protein, 6 aa, Artificial
  helical interface sequence
ENRYKE

SEQ ID NO: 16365 - protein, 7 aa, Artificial
  helical interface sequence
DVFIGRY

SEQ ID NO: 16366 - protein, 15 aa, Artificial
  helical interface sequence
INVVTCAAGILSNLT

SEQ ID NO: 16367 - protein, 7 aa, Artificial
  helical interface sequence
CGIADFF

SEQ ID NO: 16368 - protein, 8 aa, Artificial
  helical interface sequence
KEYQELNF

SEQ ID NO: 16369 - protein, 9 aa, Artificial
  helical interface sequence
ALLRYLLDK

SEQ ID NO: 16370 - protein, 8 aa, Artificial
  helical interface sequence
DAEVDELL

SEQ ID NO: 16371 - protein, 9 aa, Artificial
  helical interface sequence
EDFVEGLRV

SEQ ID NO: 16372 - protein, 10 aa, Artificial
  helical interface sequence
DFKEAFLLFD

SEQ ID NO: 16373 - protein, 8 aa, Artificial
  helical interface sequence
EAFVKHIM

SEQ ID NO: 16374 - protein, 6 aa, Artificial
  helical interface sequence
ESDIVF

SEQ ID NO: 16375 - protein, 6 aa, Artificial
  helical interface sequence
CPVGLI

SEQ ID NO: 16376 - protein, 6 aa, Artificial
  helical interface sequence
CLSETL

SEQ ID NO: 16377 - protein, 10 aa, Artificial
  helical interface sequence
WNESAFSVHA

SEQ ID NO: 16378 - protein, 12 aa, Artificial
  helical interface sequence
DTRDAWVNKIAH

SEQ ID NO: 16379 - protein, 10 aa, Artificial
  helical interface sequence
WNESAFSVHA

SEQ ID NO: 16380 - protein, 10 aa, Artificial
  helical interface sequence
AVPKAEWTNG

SEQ ID NO: 16381 - protein, 15 aa, Artificial
  helical interface sequence
KWEAEKIHIGFRQAY

SEQ ID NO: 16382 - protein, 9 aa, Artificial
  helical interface sequence
AVPKAEWTN

SEQ ID NO: 16383 - protein, 11 aa, Artificial
  helical interface sequence
EAELQDMINEV

SEQ ID NO: 16384 - protein, 22 aa, Artificial
  helical interface sequence
PVTNICQAADKQLFTLVEWAKR

SEQ ID NO: 16385 - protein, 9 aa, Artificial
  helical interface sequence
RNDIAMAIT

SEQ ID NO: 16386 - protein, 15 aa, Artificial
  helical interface sequence
AFDFYKVIESFIKAE

SEQ ID NO: 16387 - protein, 19 aa, Artificial
  helical interface sequence
REMIKHLERCEHRIMESLA

SEQ ID NO: 16388 - protein, 15 aa, Artificial
  helical interface sequence
YQVWHHRRVLVEWLK

SEQ ID NO: 16389 - protein, 10 aa, Artificial
  helical interface sequence
RADAENAMRY

SEQ ID NO: 16390 - protein, 7 aa, Artificial
  helical interface sequence
VEDIRFT

SEQ ID NO: 16391 - protein, 17 aa, Artificial
  helical interface sequence
EKFRDVYDYFRAVLQRD

SEQ ID NO: 16392 - protein, 13 aa, Artificial
  helical interface sequence
YVRLASRAAEIVA

SEQ ID NO: 16393 - protein, 27 aa, Artificial
  helical interface sequence
FEAGKRSAKISFVITVVLSLLAGVLVW

SEQ ID NO: 16394 - protein, 9 aa, Artificial
  helical interface sequence
FEISLKIFN

SEQ ID NO: 16395 - protein, 10 aa, Artificial
  helical interface sequence
KTCLLISYTT

SEQ ID NO: 16396 - protein, 6 aa, Artificial
  helical interface sequence
LKTVAL

SEQ ID NO: 16397 - protein, 11 aa, Artificial
  helical interface sequence
ADFLLEQESKR

SEQ ID NO: 16398 - protein, 5 aa, Artificial
  helical interface sequence
HASQK

SEQ ID NO: 16399 - protein, 23 aa, Artificial
  helical interface sequence
MSSAKAALESDTRVLAYHLGRNY

SEQ ID NO: 16400 - protein, 9 aa, Artificial
  helical interface sequence
FAGIAVGAA

SEQ ID NO: 16401 - protein, 7 aa, Artificial
  helical interface sequence
LIEKFLR

SEQ ID NO: 16402 - protein, 25 aa, Artificial
  helical interface sequence
RSTHNEMEKNRRAHLRLSLEKLKGL

SEQ ID NO: 16403 - protein, 19 aa, Artificial
  helical interface sequence
NPDVQAAKNKLKAGYLMSV

SEQ ID NO: 16404 - protein, 15 aa, Artificial
  helical interface sequence
SEGFLDEVGSQALAA

SEQ ID NO: 16405 - protein, 22 aa, Artificial
  helical interface sequence
PLSQCLFWALVADLLTLTWIGG

SEQ ID NO: 16406 - protein, 10 aa, Artificial
  helical interface sequence
PLTTVREQCE

SEQ ID NO: 16407 - protein, 12 aa, Artificial
  helical interface sequence
HVQNEALLRQAK

SEQ ID NO: 16408 - protein, 11 aa, Artificial
  helical interface sequence
KQHIEYARNLG

SEQ ID NO: 16409 - protein, 21 aa, Artificial
  helical interface sequence
FEEFKYLWNNIKKWQAIYKQF

SEQ ID NO: 16410 - protein, 16 aa, Artificial
  helical interface sequence
THLQVMAKERFHAGWM

SEQ ID NO: 16411 - protein, 16 aa, Artificial
  helical interface sequence
DEEYEEIVEDVRDECS

SEQ ID NO: 16412 - protein, 10 aa, Artificial
  helical interface sequence
LKYFEKWSAS

SEQ ID NO: 16413 - protein, 10 aa, Artificial
  helical interface sequence
LKYFEKWSAS

SEQ ID NO: 16414 - protein, 12 aa, Artificial
  helical interface sequence
ASQKALKEKEKA

SEQ ID NO: 16415 - protein, 7 aa, Artificial
  helical interface sequence
PIQGFSA

SEQ ID NO: 16416 - protein, 9 aa, Artificial
  helical interface sequence
GAELRHVLT

SEQ ID NO: 16417 - protein, 6 aa, Artificial
  helical interface sequence
DEDVAL

SEQ ID NO: 16418 - protein, 13 aa, Artificial
  helical interface sequence
WEDLVRKCIYAFF

SEQ ID NO: 16419 - protein, 13 aa, Artificial
  helical interface sequence
LFQFGEMILQKTG

SEQ ID NO: 16420 - protein, 7 aa, Artificial
  helical interface sequence
QIERVSR

SEQ ID NO: 16421 - protein, 19 aa, Artificial
  helical interface sequence
PEVHIAVDKFLAAVSAALA

SEQ ID NO: 16422 - protein, 18 aa, Artificial
  helical interface sequence
GNFKILSHNILVTLAIHF

SEQ ID NO: 16423 - protein, 19 aa, Artificial
  helical interface sequence
PEIQATWQKFMKVVVAAMG

SEQ ID NO: 16424 - protein, 18 aa, Artificial
  helical interface sequence
LTELDNLGHFLKGSSAAL

SEQ ID NO: 16425 - protein, 18 aa, Artificial
  helical interface sequence
LTELDNLGHFLKGSSAAL

SEQ ID NO: 16426 - protein, 10 aa, Artificial
  helical interface sequence
WTILNEIISM

SEQ ID NO: 16427 - protein, 14 aa, Artificial
  helical interface sequence
HVNQEVIKRMLNLE

SEQ ID NO: 16428 - protein, 12 aa, Artificial
  helical interface sequence
LPKRLGYITENV

SEQ ID NO: 16429 - protein, 14 aa, Artificial
  helical interface sequence
KGLLDVTCKTVANM

SEQ ID NO: 16430 - protein, 12 aa, Artificial
  helical interface sequence
PKVLVRQFVERF

SEQ ID NO: 16431 - protein, 12 aa, Artificial
  helical interface sequence
PKVLVRQFVERF

SEQ ID NO: 16432 - protein, 6 aa, Artificial
  helical interface sequence
SEELKT

SEQ ID NO: 16433 - protein, 25 aa, Artificial
  helical interface sequence
GPTLDTLQLDVADFATTIWQQMEEL

SEQ ID NO: 16434 - protein, 12 aa, Artificial
  helical interface sequence
SHLVEALYLVCG

SEQ ID NO: 16435 - protein, 15 aa, Artificial
  helical interface sequence
IENLVKRVADQMQQY

SEQ ID NO: 16436 - protein, 15 aa, Artificial
  helical interface sequence
NVRFVGFEINEYLHK

SEQ ID NO: 16437 - protein, 8 aa, Artificial
  helical interface sequence
STLLGWFG

SEQ ID NO: 16438 - protein, 5 aa, Artificial
  helical interface sequence
SEELQ

SEQ ID NO: 16439 - protein, 9 aa, Artificial
  helical interface sequence
VAGKAVMKA

SEQ ID NO: 16440 - protein, 7 aa, Artificial
  helical interface sequence
DLSLLRI

SEQ ID NO: 16441 - protein, 18 aa, Artificial
  helical interface sequence
PSVHASLDKFLANVSTVL

SEQ ID NO: 16442 - protein, 16 aa, Artificial
  helical interface sequence
VDEVGGEALGRLLVVY

SEQ ID NO: 16443 - protein, 14 aa, Artificial
  helical interface sequence
LGLYNEAVKIIHDF

SEQ ID NO: 16444 - protein, 15 aa, Artificial
  helical interface sequence
HASDVLLNLNRLRSR

SEQ ID NO: 16445 - protein, 5 aa, Artificial
  helical interface sequence
LVLPG

SEQ ID NO: 16446 - protein, 15 aa, Artificial
  helical interface sequence
IIARRWINGMLISLL

SEQ ID NO: 16447 - protein, 8 aa, Artificial
  helical interface sequence
DHGQEALE

SEQ ID NO: 16448 - protein, 9 aa, Artificial
  helical interface sequence
YRLTQGVVK

SEQ ID NO: 16449 - protein, 8 aa, Artificial
  helical interface sequence
DHGQEALE

SEQ ID NO: 16450 - protein, 7 aa, Artificial
  helical interface sequence
QFLYTTG

SEQ ID NO: 16451 - protein, 23 aa, Artificial
  helical interface sequence
AQGALANIAVDKANLDVMKERSN

SEQ ID NO: 16452 - protein, 11 aa, Artificial
  helical interface sequence
MEFVIDVLQKF

SEQ ID NO: 16453 - protein, 15 aa, Artificial
  helical interface sequence
CEDMMKRAVFARELG

SEQ ID NO: 16454 - protein, 15 aa, Artificial
  helical interface sequence
CEDMMKRAVFARELG

SEQ ID NO: 16455 - protein, 15 aa, Artificial
  helical interface sequence
CEDMMKRAVFARELG

SEQ ID NO: 16456 - protein, 15 aa, Artificial
  helical interface sequence
CEDMMKRAVFARELG

SEQ ID NO: 16457 - protein, 15 aa, Artificial
  helical interface sequence
CEDMMKRAVFARELG

SEQ ID NO: 16458 - protein, 19 aa, Artificial
  helical interface sequence
FKEKLKWTGIVLVLYFIMG

SEQ ID NO: 16459 - protein, 6 aa, Artificial
  helical interface sequence
LEAIAE

SEQ ID NO: 16460 - protein, 22 aa, Artificial
  helical interface sequence
VKYRRRVLLAISRKVVDQLWEA

SEQ ID NO: 16461 - protein, 21 aa, Artificial
  helical interface sequence
KRAEAYIKLRIKGAIYDYLRS

SEQ ID NO: 16462 - protein, 22 aa, Artificial
  helical interface sequence
PKRAEAYIKLRIKGAIYDYLRS

SEQ ID NO: 16463 - protein, 22 aa, Artificial
  helical interface sequence
QKSTQNAINGITNKVNSVIEKM

SEQ ID NO: 16464 - protein, 52 aa, Artificial; identical to SEQ ID NO: 1225
  helical interface sequence

SEQ ID NO: 16465 - protein, 50 aa, Artificial; identical to SEQ ID NO: 605
  helical interface sequence

SEQ ID NO: 16466 - protein, 22 aa, Artificial
  helical interface sequence
AADTQAIADIVQYHLELYTSQY

SEQ ID NO: 16467 - protein, 22 aa, Artificial
  helical interface sequence
GDTVQFAEYIQANIQLYSIRED

SEQ ID NO: 16468 - protein, 22 aa, Artificial
  helical interface sequence
AADGDALVKRFKNSVKWYHFDH

SEQ ID NO: 16469 - protein, 11 aa, Artificial
  helical interface sequence
SQGAKTYLERT

SEQ ID NO: 16470 - protein, 22 aa, Artificial
  helical interface sequence
AADTQAIADIVQYHLELYTSQY

SEQ ID NO: 16471 - protein, 13 aa, Artificial
  helical interface sequence
VGELFWKVKEEEG

SEQ ID NO: 16472 - protein, 17 aa, Artificial
  helical interface sequence
PQAVSSFVRQELAKSIR

SEQ ID NO: 16473 - protein, 6 aa, Artificial
  helical interface sequence
DEQLKS

SEQ ID NO: 16474 - protein, 5 aa, Artificial
  helical interface sequence
DEQLK

SEQ ID NO: 16475 - protein, 7 aa, Artificial
  helical interface sequence
VARGLAS

SEQ ID NO: 16476 - protein, 29 aa, Artificial
  helical interface sequence
CDEKTQSLGVKFLDEYQSKVKRQIFSGYQ

SEQ ID NO: 16477 - protein, 19 aa, Artificial
  helical interface sequence
GPEASQAQAMTFLIRDQKL

SEQ ID NO: 16478 - protein, 16 aa, Artificial
  helical interface sequence
VAAIFRFLLFFQGFHN

SEQ ID NO: 16479 - protein, 8 aa, Artificial
  helical interface sequence
ETITYVFI

SEQ ID NO: 16480 - protein, 9 aa, Artificial
  helical interface sequence
ISQEIRAAE

SEQ ID NO: 16481 - protein, 8 aa, Artificial
  helical interface sequence
ETITYVFI

SEQ ID NO: 16482 - protein, 20 aa, Artificial
  helical interface sequence
RDEYYHLLAEKIYKIQKELE

SEQ ID NO: 16483 - protein, 22 aa, Artificial
  helical interface sequence
AQGALANIAVDKANLEIMTKRS

SEQ ID NO: 16484 - protein, 22 aa, Artificial
  helical interface sequence
RPTIYSNVIKGMRVLVDAREKL

SEQ ID NO: 16485 - protein, 7 aa, Artificial
  helical interface sequence
YNRIRSG

SEQ ID NO: 16486 - protein, 21 aa, Artificial
  helical interface sequence
DSQIEKERDVILQELQENDTS

SEQ ID NO: 16487 - protein, 35 aa, Artificial; identical to SEQ ID NO: 2150
  helical interface sequence

SEQ ID NO: 16488 - protein, 15 aa, Artificial
  helical interface sequence
RADVWKWLINMAVSE

SEQ ID NO: 16489 - protein, 17 aa, Artificial
  helical interface sequence
KQEMVDIIETVYRGARK

SEQ ID NO: 16490 - protein, 7 aa, Artificial
  helical interface sequence
SEQLTSG

SEQ ID NO: 16491 - protein, 6 aa, Artificial
  helical interface sequence
PERYKN

SEQ ID NO: 16492 - protein, 15 aa, Artificial
  helical interface sequence
AIEFSERICVERRRL

SEQ ID NO: 16493 - protein, 16 aa, Artificial
  helical interface sequence
VVVNKAAVMVHQLSKK

SEQ ID NO: 16494 - protein, 10 aa, Artificial
  helical interface sequence
REGLLAIFKS

SEQ ID NO: 16495 - protein, 14 aa, Artificial
  helical interface sequence
EDITEPAICALRHL

SEQ ID NO: 16496 - protein, 5 aa, Artificial
  helical interface sequence
PETNS

SEQ ID NO: 16497 - protein, 9 aa, Artificial
  helical interface sequence
MGFTIMENF

SEQ ID NO: 16498 - protein, 33 aa, Artificial; identical to SEQ ID NO: 7149
  helical interface sequence

SEQ ID NO: 16499 - protein, 10 aa, Artificial
  helical interface sequence
NTNLAVVFGP

SEQ ID NO: 16500 - protein, 7 aa, Artificial
  helical interface sequence
TIFEKKH

SEQ ID NO: 16501 - protein, 15 aa, Artificial
  helical interface sequence
AEEAVRIARLAKASG

SEQ ID NO: 16502 - protein, 16 aa, Artificial
  helical interface sequence
IHEGLKLANEQIQKAG

SEQ ID NO: 16503 - protein, 16 aa, Artificial
  helical interface sequence
IHEGLKLANEQIQKAG

SEQ ID NO: 16504 - protein, 11 aa, Artificial
  helical interface sequence
FVRYVQGLKKK

SEQ ID NO: 16505 - protein, 18 aa, Artificial
  helical interface sequence
RTIESILEPVAQQISHLV

SEQ ID NO: 16506 - protein, 7 aa, Artificial
  helical interface sequence
EKELFES

SEQ ID NO: 16507 - protein, 11 aa, Artificial
  helical interface sequence
FVRYVQGLKKK

SEQ ID NO: 16508 - protein, 6 aa, Artificial
  helical interface sequence
DEQLKS

SEQ ID NO: 16509 - protein, 32 aa, Artificial
  helical interface sequence
QAKAVQVYNSRKSELDAANKTLADAIAEIKQF

SEQ ID NO: 16510 - protein, 14 aa, Artificial
  helical interface sequence
DEQIAAQVDYIVAN

SEQ ID NO: 16511 - protein, 14 aa, Artificial
  helical interface sequence
DEQIAAQVDYIVAN

SEQ ID NO: 16512 - protein, 21 aa, Artificial
  helical interface sequence
NAPGAAANRVALEACTQARNE

SEQ ID NO: 16513 - protein, 10 aa, Artificial
  helical interface sequence
PELAAACEVW

SEQ ID NO: 16514 - protein, 24 aa, Artificial
  helical interface sequence
FLDQQAQERSMDKCLGWFLEPVVR

SEQ ID NO: 16515 - protein, 8 aa, Artificial
  helical interface sequence
VAEKQKLF

SEQ ID NO: 16516 - protein, 8 aa, Artificial
  helical interface sequence
VAEKQKLF

SEQ ID NO: 16517 - protein, 14 aa, Artificial
  helical interface sequence
ISWVSTWDDRRAEG

SEQ ID NO: 16518 - protein, 6 aa, Artificial
  helical interface sequence
IRRKFE

SEQ ID NO: 16519 - protein, 7 aa, Artificial
  helical interface sequence
GTIKAML

SEQ ID NO: 16520 - protein, 7 aa, Artificial
  helical interface sequence
VLGLVFA

SEQ ID NO: 16521 - protein, 26 aa, Artificial
  helical interface sequence
EMLYAALLSFGLIFVGWGLGVLLLKI

SEQ ID NO: 16522 - protein, 25 aa, Artificial
  helical interface sequence
PNRVKWMIAFICLVMLAQLMLILKK

SEQ ID NO: 16523 - protein, 26 aa, Artificial
  helical interface sequence
EMLYAALLSFGLIFVGWGLGVLLLKI

SEQ ID NO: 16524 - protein, 9 aa, Artificial
  helical interface sequence
IKVREAAMR

SEQ ID NO: 16525 - protein, 16 aa, Artificial
  helical interface sequence
SPVELEKLVREKKREL

SEQ ID NO: 16526 - protein, 24 aa, Artificial
  helical interface sequence
GPYQLIIFHFLLGASCYMGRQWEL

SEQ ID NO: 16527 - protein, 26 aa, Artificial
  helical interface sequence
PFHQLGVAGVFGGALFCAMHGSLVTS

SEQ ID NO: 16528 - protein, 18 aa, Artificial
  helical interface sequence
PFHMMGVAGVLGGALLCA

SEQ ID NO: 16529 - protein, 26 aa, Artificial
  helical interface sequence
PFHQLGVAGVFGGALFCAMHGSLVTS

SEQ ID NO: 16530 - protein, 18 aa, Artificial
  helical interface sequence
PFHMMGVAGVLGGALLCA

SEQ ID NO: 16531 - protein, 6 aa, Artificial
  helical interface sequence
LAYDVF

SEQ ID NO: 16532 - protein, 22 aa, Artificial
  helical interface sequence
SLTRRQQISTWIDIISQYCKTK

SEQ ID NO: 16533 - protein, 9 aa, Artificial
  helical interface sequence
DKELTAMLK

SEQ ID NO: 16534 - protein, 6 aa, Artificial
  helical interface sequence
DGDREL

SEQ ID NO: 16535 - protein, 6 aa, Artificial
  helical interface sequence
DGDREL

SEQ ID NO: 16536 - protein, 21 aa, Artificial
  helical interface sequence
DDEIYQLACRDEQEQIELIRG

SEQ ID NO: 16537 - protein, 14 aa, Artificial
  helical interface sequence
ENDIKNAINLMFWG

SEQ ID NO: 16538 - protein, 10 aa, Artificial
  helical interface sequence
YEEFVQMMTA

SEQ ID NO: 16539 - protein, 7 aa, Artificial
  helical interface sequence
GYLSDYY

SEQ ID NO: 16540 - protein, 19 aa, Artificial
  helical interface sequence
LIEARKYLEQLHRKLKNCK

SEQ ID NO: 16541 - protein, 19 aa, Artificial
  helical interface sequence
LPLLHQAFEQLLRLQQEVL

SEQ ID NO: 16542 - protein, 7 aa, Artificial
  helical interface sequence
ALLRYLL

SEQ ID NO: 16543 - protein, 9 aa, Artificial
  helical interface sequence
EAEKLLRDA

SEQ ID NO: 16544 - protein, 22 aa, Artificial
  helical interface sequence
EAEQAADQQEREGALELLADLC

SEQ ID NO: 16545 - protein, 12 aa, Artificial
  helical interface sequence
MKDTLRIAYLTE

SEQ ID NO: 16546 - protein, 22 aa, Artificial
  helical interface sequence
LPALRSIGLKCLEHLFFFKLIG

SEQ ID NO: 16547 - protein, 7 aa, Artificial
  helical interface sequence
PSVVEFL

SEQ ID NO: 16548 - protein, 20 aa, Artificial
  helical interface sequence
PLFNQILTLQQSIKQLKGQL

SEQ ID NO: 16549 - protein, 12 aa, Artificial
  helical interface sequence
FQVEYAREAVKK

SEQ ID NO: 16550 - protein, 15 aa, Artificial
  helical interface sequence
IENLVKRVADQMQQY

SEQ ID NO: 16551 - protein, 13 aa, Artificial
  helical interface sequence
PYIRERVVDQLAH

SEQ ID NO: 16552 - protein, 9 aa, Artificial
  helical interface sequence
FPDFVHAVK

SEQ ID NO: 16553 - protein, 13 aa, Artificial
  helical interface sequence
FHRRELWEAIEAG

SEQ ID NO: 16554 - protein, 21 aa, Artificial
  helical interface sequence
DRKVAMGFLAATILIVVMAMS

SEQ ID NO: 16555 - protein, 15 aa, Artificial
  helical interface sequence
PLQRLKVKRQWAEAY

SEQ ID NO: 16556 - protein, 16 aa, Artificial
  helical interface sequence
PDAWSRCFNRITTGMT

SEQ ID NO: 16557 - protein, 6 aa, Artificial
  helical interface sequence
KTSIAR

SEQ ID NO: 16558 - protein, 5 aa, Artificial
  helical interface sequence
FRQNL

SEQ ID NO: 16559 - protein, 5 aa, Artificial
  helical interface sequence
SEQLT

SEQ ID NO: 16560 - protein, 9 aa, Artificial
  helical interface sequence
RALAPMYYR

SEQ ID NO: 16561 - protein, 21 aa, Artificial
  helical interface sequence
GWKVEKIQEIYIEALKAYVEN

SEQ ID NO: 16562 - protein, 13 aa, Artificial
  helical interface sequence
EALGEFIFDKKLL

SEQ ID NO: 16563 - protein, 6 aa, Artificial
  helical interface sequence
KSSFKF

SEQ ID NO: 16564 - protein, 21 aa, Artificial
  helical interface sequence
IPDARNAALRAKAEAAEFRYK

SEQ ID NO: 16565 - protein, 10 aa, Artificial
  helical interface sequence
YQVEYAFKAT

SEQ ID NO: 16566 - protein, 20 aa, Artificial
  helical interface sequence
LGVAVQHAVLKIIDELEIKT

SEQ ID NO: 16567 - protein, 17 aa, Artificial
  helical interface sequence
TKLLVSEVAKIMQEATQ

SEQ ID NO: 16568 - protein, 9 aa, Artificial
  helical interface sequence
SDQLFGMCE

SEQ ID NO: 16569 - protein, 11 aa, Artificial
  helical interface sequence
VGELFWKVKEE

SEQ ID NO: 16570 - protein, 21 aa, Artificial
  helical interface sequence
IPDARNAALRAKAEAAEFRYK

SEQ ID NO: 16571 - protein, 15 aa, Artificial
  helical interface sequence
INSAARNIQHLLYGK

SEQ ID NO: 16572 - protein, 22 aa, Artificial
  helical interface sequence
IPDGRHLVNRGREEAASFKKLY

SEQ ID NO: 16573 - protein, 7 aa, Artificial
  helical interface sequence
FGAHMAN

SEQ ID NO: 16574 - protein, 18 aa, Artificial
  helical interface sequence
VQVAEEAIVNAMRVLYYR

SEQ ID NO: 16575 - protein, 17 aa, Artificial
  helical interface sequence
PQAVSSFVRQELAKSIR

SEQ ID NO: 16576 - protein, 12 aa, Artificial
  helical interface sequence
SREIQTAVRLLL

SEQ ID NO: 16577 - protein, 10 aa, Artificial
  helical interface sequence
PRHLQLAVRN

SEQ ID NO: 16578 - protein, 11 aa, Artificial
  helical interface sequence
AAIRDNYFRSG

SEQ ID NO: 16579 - protein, 26 aa, Artificial
  helical interface sequence
AKIKREWLEVLEETKRALSDKRRREQ

SEQ ID NO: 16580 - protein, 20 aa, Artificial
  helical interface sequence
ALANIAVDKANLEIMTKRSN

SEQ ID NO: 16581 - protein, 13 aa, Artificial
  helical interface sequence
AVDTYCRHNYGVG

SEQ ID NO: 16582 - protein, 8 aa, Artificial
  helical interface sequence
RPDAEYWN

SEQ ID NO: 16583 - protein, 11 aa, Artificial
  helical interface sequence
TVALREIRRYQ

SEQ ID NO: 16584 - protein, 7 aa, Artificial
  helical interface sequence
EELNKLL

SEQ ID NO: 16585 - protein, 9 aa, Artificial
  helical interface sequence
RNNNDRMKV

SEQ ID NO: 16586 - protein, 12 aa, Artificial
  helical interface sequence
PGISETAMIFAG

SEQ ID NO: 16587 - protein, 30 aa, Artificial; identical to SEQ ID NO: 8187
  helical interface sequence

SEQ ID NO: 16588 - protein, 30 aa, Artificial; identical to SEQ ID NO: 8187
  helical interface sequence

SEQ ID NO: 16589 - protein, 12 aa, Artificial
  helical interface sequence
ELDIWQYIYLEG

SEQ ID NO: 16590 - protein, 7 aa, Artificial
  helical interface sequence
CEDIARV

SEQ ID NO: 16591 - protein, 8 aa, Artificial
  helical interface sequence
KQTAAKLL

SEQ ID NO: 16592 - protein, 6 aa, Artificial
  helical interface sequence
IQHLAG

SEQ ID NO: 16593 - protein, 11 aa, Artificial
  helical interface sequence
VAVGKLLDYLN

SEQ ID NO: 16594 - protein, 21 aa, Artificial
  helical interface sequence
GCQLQEALLQQERPIRNSVDE

SEQ ID NO: 16595 - protein, 25 aa, Artificial
  helical interface sequence
CRMKGLIDEVNQDFTNRINKLKNSL

SEQ ID NO: 16596 - protein, 6 aa, Artificial
  helical interface sequence
STFDLF

SEQ ID NO: 16597 - protein, 20 aa, Artificial
  helical interface sequence
PDNFKLLADCLTIVVAARFG

SEQ ID NO: 16598 - protein, 10 aa, Artificial
  helical interface sequence
REDQIALLKT

SEQ ID NO: 16599 - protein, 14 aa, Artificial
  helical interface sequence
SYGKFIQRDTLHKG

SEQ ID NO: 16600 - protein, 6 aa, Artificial
  helical interface sequence
EKDIVF

SEQ ID NO: 16601 - protein, 29 aa, Artificial
  helical interface sequence
ESIQKKCEEVIAKYKPEWEAVVAKYRPRL

SEQ ID NO: 16602 - protein, 68 aa, Artificial; identical to SEQ ID NO: 497
  helical interface sequence

SEQ ID NO: 16603 - protein, 23 aa, Artificial
  helical interface sequence
EDKRAKVTSAMQTMLFTMLRKLD

SEQ ID NO: 16604 - protein, 13 aa, Artificial
  helical interface sequence
LCVEWLRRYLENG

SEQ ID NO: 16605 - protein, 8 aa, Artificial
  helical interface sequence
QSKYLMMY

SEQ ID NO: 16606 - protein, 8 aa, Artificial
  helical interface sequence
QSKYLMMY

SEQ ID NO: 16607 - protein, 5 aa, Artificial
  helical interface sequence
PEEIR

SEQ ID NO: 16608 - protein, 8 aa, Artificial
  helical interface sequence
EEYIRKAI

SEQ ID NO: 16609 - protein, 16 aa, Artificial
  helical interface sequence
WADIINRANLGMEVMH

SEQ ID NO: 16610 - protein, 6 aa, Artificial
  helical interface sequence
LAYDVF

SEQ ID NO: 16611 - protein, 22 aa, Artificial
  helical interface sequence
IVATVAGMGVIVIVGLFFYGAY

SEQ ID NO: 16612 - protein, 17 aa, Artificial
  helical interface sequence
SMDSRLQRIHAEIKNSL

SEQ ID NO: 16613 - protein, 12 aa, Artificial
  helical interface sequence
EETRAELSQLCA

SEQ ID NO: 16614 - protein, 6 aa, Artificial
  helical interface sequence
VPRVIG

SEQ ID NO: 16615 - protein, 35 aa, Artificial; identical to SEQ ID NO: 716
  helical interface sequence

SEQ ID NO: 16616 - protein, 17 aa, Artificial
  helical interface sequence
PNMMIDAAKLLSALCIL

SEQ ID NO: 16617 - protein, 14 aa, Artificial
  helical interface sequence
EVALQEYRTVARSL

SEQ ID NO: 16618 - protein, 12 aa, Artificial
  helical interface sequence
EAELQDMINEVD

SEQ ID NO: 16619 - protein, 8 aa, Artificial
  helical interface sequence
GDRIIESF

SEQ ID NO: 16620 - protein, 17 aa, Artificial
  helical interface sequence
WISQATAIWTARKIVSD

SEQ ID NO: 16621 - protein, 13 aa, Artificial
  helical interface sequence
KSEKEAIVSYTKS

SEQ ID NO: 16622 - protein, 12 aa, Artificial
  helical interface sequence
VYVAQVAAEESG

SEQ ID NO: 16623 - protein, 29 aa, Artificial
  helical interface sequence
PDEFRQAFDLAVKGINIIYNLEREALKSK

SEQ ID NO: 16624 - protein, 20 aa, Artificial
  helical interface sequence
KGESVCLDRCVSKYLDIHER

SEQ ID NO: 16625 - protein, 5 aa, Artificial
  helical interface sequence
KKLTE

SEQ ID NO: 16626 - protein, 7 aa, Artificial
  helical interface sequence
SACHRKC

SEQ ID NO: 16627 - protein, 8 aa, Artificial
  helical interface sequence
SACHRKCV

SEQ ID NO: 16628 - protein, 14 aa, Artificial
  helical interface sequence
DDMFNALLPDLIAG

SEQ ID NO: 16629 - protein, 19 aa, Artificial
  helical interface sequence
ANVMEILGIAINRYNGLTL

SEQ ID NO: 16630 - protein, 12 aa, Artificial
  helical interface sequence
AFAKVVAQADAR

SEQ ID NO: 16631 - protein, 12 aa, Artificial
  helical interface sequence
AFAKVVAQADAR

SEQ ID NO: 16632 - protein, 11 aa, Artificial
  helical interface sequence
KFELACLANLC

SEQ ID NO: 16633 - protein, 10 aa, Artificial
  helical interface sequence
RTFSERTLAF

SEQ ID NO: 16634 - protein, 15 aa, Artificial
  helical interface sequence
RARAGLEAARAFANN

SEQ ID NO: 16635 - protein, 15 aa, Artificial
  helical interface sequence
KKQVLRMEHLVLKVL

SEQ ID NO: 16636 - protein, 8 aa, Artificial
  helical interface sequence
IPEFFHIM

SEQ ID NO: 16637 - protein, 22 aa, Artificial
  helical interface sequence
EFLTQSKTRIQEYEKELEKMRN

SEQ ID NO: 16638 - protein, 12 aa, Artificial
  helical interface sequence
AREQLRLLGEKV

SEQ ID NO: 16639 - protein, 14 aa, Artificial
  helical interface sequence
EEVLEELEMALLAA

SEQ ID NO: 16640 - protein, 11 aa, Artificial
  helical interface sequence
PRDLISLGVVI

SEQ ID NO: 16641 - protein, 7 aa, Artificial
  helical interface sequence
FAALLRL

SEQ ID NO: 16642 - protein, 7 aa, Artificial
  helical interface sequence
FAALLRL

SEQ ID NO: 16643 - protein, 23 aa, Artificial
  helical interface sequence
AIQKQEEINFRLQDYIDRIIVAI

SEQ ID NO: 16644 - protein, 23 aa, Artificial
  helical interface sequence
AIQKQEEINFRLQDYIDRIIVAI

SEQ ID NO: 16645 - protein, 24 aa, Artificial
  helical interface sequence
QSFLLKCLEQVRKIQGDGAALQEK

SEQ ID NO: 16646 - protein, 5 aa, Artificial
  helical interface sequence
QKDLW

SEQ ID NO: 16647 - protein, 9 aa, Artificial
  helical interface sequence
AEERRRKQN

SEQ ID NO: 16648 - protein, 10 aa, Artificial
  helical interface sequence
PNYRRRLVRW

SEQ ID NO: 16649 - protein, 7 aa, Artificial
  helical interface sequence
QTVYLGM

SEQ ID NO: 16650 - protein, 12 aa, Artificial
  helical interface sequence
HLDACMELSKLM

SEQ ID NO: 16651 - protein, 12 aa, Artificial
  helical interface sequence
KYPLQLAELLKY

SEQ ID NO: 16652 - protein, 11 aa, Artificial
  helical interface sequence
AAELRHVMTNL

SEQ ID NO: 16653 - protein, 8 aa, Artificial
  helical interface sequence
DEEVDEMI

SEQ ID NO: 16654 - protein, 8 aa, Artificial
  helical interface sequence
DEEVDEMI

SEQ ID NO: 16655 - protein, 10 aa, Artificial
  helical interface sequence
EAELQDMINE

SEQ ID NO: 16656 - protein, 11 aa, Artificial
  helical interface sequence
AAELRHVMTNL

SEQ ID NO: 16657 - protein, 9 aa, Artificial
  helical interface sequence
LGTVMRSLG

SEQ ID NO: 16658 - protein, 11 aa, Artificial
  helical interface sequence
AAELRHVMTNL

SEQ ID NO: 16659 - protein, 12 aa, Artificial
  helical interface sequence
TASVNCAKKIVS

SEQ ID NO: 16660 - protein, 7 aa, Artificial
  helical interface sequence
LRRLEMY

SEQ ID NO: 16661 - protein, 10 aa, Artificial
  helical interface sequence
PNYRRRLVRW

SEQ ID NO: 16662 - protein, 8 aa, Artificial
  helical interface sequence
HTLFRAYT

SEQ ID NO: 16663 - protein, 11 aa, Artificial
  helical interface sequence
HMNDIKQLLWN

SEQ ID NO: 16664 - protein, 23 aa, Artificial
  helical interface sequence
ELTWISGVILAVITVSFGVTGYS

SEQ ID NO: 16665 - protein, 16 aa, Artificial
  helical interface sequence
DYAVRLREKQKLRRIY

SEQ ID NO: 16666 - protein, 10 aa, Artificial
  helical interface sequence
IEYIKDLLEN

SEQ ID NO: 16667 - protein, 10 aa, Artificial
  helical interface sequence
KSSLVLRFVK

SEQ ID NO: 16668 - protein, 8 aa, Artificial
  helical interface sequence
MHEWLQEG

SEQ ID NO: 16669 - protein, 5 aa, Artificial
  helical interface sequence
ALYEQ

SEQ ID NO: 16670 - protein, 14 aa, Artificial
  helical interface sequence
RIRYVLSSYLRCRL

SEQ ID NO: 16671 - protein, 9 aa, Artificial
  helical interface sequence
LTKLLLNHA

SEQ ID NO: 16672 - protein, 12 aa, Artificial
  helical interface sequence
RGLFQTGQKGLN

SEQ ID NO: 16673 - protein, 12 aa, Artificial
  helical interface sequence
ALYEQNQSDVNE

SEQ ID NO: 16674 - protein, 10 aa, Artificial
  helical interface sequence
GTFLTQALNH

SEQ ID NO: 16675 - protein, 10 aa, Artificial
  helical interface sequence
PEELAFAREF

SEQ ID NO: 16676 - protein, 7 aa, Artificial
  helical interface sequence
TNEFAKT

SEQ ID NO: 16677 - protein, 9 aa, Artificial
  helical interface sequence
YEDLMKKVM

SEQ ID NO: 16678 - protein, 14 aa, Artificial
  helical interface sequence
AGELIAEAALALEM

SEQ ID NO: 16679 - protein, 6 aa, Artificial
  helical interface sequence
FITTIG

SEQ ID NO: 16680 - protein, 11 aa, Artificial
  helical interface sequence
RTITTAYYRGA

SEQ ID NO: 16681 - protein, 9 aa, Artificial
  helical interface sequence
LKPLEEVLN

SEQ ID NO: 16682 - protein, 7 aa, Artificial
  helical interface sequence
CEDIARV

SEQ ID NO: 16683 - protein, 12 aa, Artificial
  helical interface sequence
SREVQTAVRLLL

SEQ ID NO: 16684 - protein, 10 aa, Artificial
  helical interface sequence
PRHLQLAIRN

SEQ ID NO: 16685 - protein, 28 aa, Artificial
  helical interface sequence
SGIKSLYVRLRNLTVILWAIYPFIWLLG

SEQ ID NO: 16686 - protein, 8 aa, Artificial
  helical interface sequence
RRVIEQTI

SEQ ID NO: 16687 - protein, 7 aa, Artificial
  helical interface sequence
SEQLTSG

SEQ ID NO: 16688 - protein, 14 aa, Artificial
  helical interface sequence
TGHSLLHTLYGRSL

SEQ ID NO: 16689 - protein, 17 aa, Artificial
  helical interface sequence
IFYSELARGIEDIATMY

SEQ ID NO: 16690 - protein, 6 aa, Artificial
  helical interface sequence
QEIYNS

SEQ ID NO: 16691 - protein, 6 aa, Artificial
  helical interface sequence
DEQLKS

SEQ ID NO: 16692 - protein, 19 aa, Artificial
  helical interface sequence
EDELKEQLLDRIGQCVMTA

SEQ ID NO: 16693 - protein, 12 aa, Artificial
  helical interface sequence
PKDIQLARRIRG

SEQ ID NO: 16694 - protein, 23 aa, Artificial
  helical interface sequence
KESTQKAIDGVTNKVNSIIDKMN

SEQ ID NO: 16695 - protein, 26 aa, Artificial
  helical interface sequence
PAIGIPALLGSVTVIAILVHLAILSH

SEQ ID NO: 16696 - protein, 5 aa, Artificial
  helical interface sequence
HASQK

SEQ ID NO: 16697 - protein, 12 aa, Artificial
  helical interface sequence
EAELQDMINEVD

SEQ ID NO: 16698 - protein, 9 aa, Artificial
  helical interface sequence
VDELILDVI

SEQ ID NO: 16699 - protein, 9 aa, Artificial
  helical interface sequence
VDELILDVI

SEQ ID NO: 16700 - protein, 9 aa, Artificial
  helical interface sequence
VDELILDVI

SEQ ID NO: 16701 - protein, 9 aa, Artificial
  helical interface sequence
VDELILDVI

SEQ ID NO: 16702 - protein, 15 aa, Artificial
  helical interface sequence
PMNFVGTVVHLLTKG

SEQ ID NO: 16703 - protein, 9 aa, Artificial
  helical interface sequence
VDELILDVI

SEQ ID NO: 16704 - protein, 9 aa, Artificial
  helical interface sequence
VDELILDVI

SEQ ID NO: 16705 - protein, 12 aa, Artificial
  helical interface sequence
GLQALDIVTKER

SEQ ID NO: 16706 - protein, 11 aa, Artificial
  helical interface sequence
PTEVMGVASFY

SEQ ID NO: 16707 - protein, 11 aa, Artificial
  helical interface sequence
PTEVMGVASFY

SEQ ID NO: 16708 - protein, 14 aa, Artificial
  helical interface sequence
RERETILDLFEWVT

SEQ ID NO: 16709 - protein, 10 aa, Artificial
  helical interface sequence
YLQNITYTPR

SEQ ID NO: 16710 - protein, 13 aa, Artificial
  helical interface sequence
EKLNQLWEKAQRL

SEQ ID NO: 16711 - protein, 19 aa, Artificial
  helical interface sequence
ANAILAVSLANAKAAAAAK

SEQ ID NO: 16712 - protein, 17 aa, Artificial
  helical interface sequence
QMSFWGATVITGLFGAI

SEQ ID NO: 16713 - protein, 17 aa, Artificial
  helical interface sequence
QMSFWGATVITGLFGAI

SEQ ID NO: 16714 - protein, 23 aa, Artificial
  helical interface sequence
YATAGAGAVATGAAVWPLINQMN

SEQ ID NO: 16715 - protein, 17 aa, Artificial
  helical interface sequence
QMSFWGATVITGLFGAI

SEQ ID NO: 16716 - protein, 16 aa, Artificial
  helical interface sequence
LGDVRESVRRVEANKL

SEQ ID NO: 16717 - protein, 14 aa, Artificial
  helical interface sequence
VREVFEMATRAGLQ

SEQ ID NO: 16718 - protein, 11 aa, Artificial
  helical interface sequence
VVEIILNLKEL

SEQ ID NO: 16719 - protein, 7 aa, Artificial
  helical interface sequence
PEKIRSW

SEQ ID NO: 16720 - protein, 6 aa, Artificial
  helical interface sequence
QRFLTQ

SEQ ID NO: 16721 - protein, 7 aa, Artificial
  helical interface sequence
SEQLTSG

SEQ ID NO: 16722 - protein, 7 aa, Artificial
  helical interface sequence
SEQLTSG

SEQ ID NO: 16723 - protein, 15 aa, Artificial
  helical interface sequence
EDITEPAICALRHLT

SEQ ID NO: 16724 - protein, 16 aa, Artificial
  helical interface sequence
VLEGLKVKSEWGRAYG

SEQ ID NO: 16725 - protein, 14 aa, Artificial
  helical interface sequence
PDMLAAQLAHLKVQ

SEQ ID NO: 16726 - protein, 15 aa, Artificial
  helical interface sequence
MDKINNRFNYLFEVN

SEQ ID NO: 16727 - protein, 5 aa, Artificial
  helical interface sequence
YFKQS

SEQ ID NO: 16728 - protein, 28 aa, Artificial
  helical interface sequence
FSDIGSLVRAHKHLETLLEVLVTLSQQG

SEQ ID NO: 16729 - protein, 5 aa, Artificial
  helical interface sequence
RHDKR

SEQ ID NO: 16730 - protein, 6 aa, Artificial
  helical interface sequence
DEQLKS

SEQ ID NO: 16731 - protein, 7 aa, Artificial
  helical interface sequence
ALKALEG

SEQ ID NO: 16732 - protein, 7 aa, Artificial
  helical interface sequence
ALKALEG

SEQ ID NO: 16733 - protein, 7 aa, Artificial
  helical interface sequence
ALKALEG

SEQ ID NO: 16734 - protein, 7 aa, Artificial
  helical interface sequence
ALKALEG

SEQ ID NO: 16735 - protein, 13 aa, Artificial
  helical interface sequence
SDGFKSAISEVST

SEQ ID NO: 16736 - protein, 53 aa, Artificial; identical to SEQ ID NO: 9793
  helical interface sequence

SEQ ID NO: 16737 - protein, 15 aa, Artificial
  helical interface sequence
LSKQAVAYRQLSLLL

SEQ ID NO: 16738 - protein, 8 aa, Artificial
  helical interface sequence
QDIIAILG

SEQ ID NO: 16739 - protein, 6 aa, Artificial
  helical interface sequence
NTAIAE

SEQ ID NO: 16740 - protein, 7 aa, Artificial
  helical interface sequence
RDSLEAR

SEQ ID NO: 16741 - protein, 7 aa, Artificial
  helical interface sequence
RDSLEAR

SEQ ID NO: 16742 - protein, 11 aa, Artificial
  helical interface sequence
VGEDIRKLDYG

SEQ ID NO: 16743 - protein, 11 aa, Artificial
  helical interface sequence
RIKVREAAMRG

SEQ ID NO: 16744 - protein, 8 aa, Artificial
  helical interface sequence
HVDVFFQK

SEQ ID NO: 16745 - protein, 8 aa, Artificial
  helical interface sequence
EASLKKVL

SEQ ID NO: 16746 - protein, 8 aa, Artificial
  helical interface sequence
EASLKKVL

SEQ ID NO: 16747 - protein, 7 aa, Artificial
  helical interface sequence
SEQLTSG

SEQ ID NO: 16748 - protein, 11 aa, Artificial
  helical interface sequence
FHDLMELFRIG

SEQ ID NO: 16749 - protein, 21 aa, Artificial
  helical interface sequence
QGALANIAVDKANLEIMTKRS

SEQ ID NO: 16750 - protein, 6 aa, Artificial
  helical interface sequence
EAEISH

SEQ ID NO: 16751 - protein, 21 aa, Artificial
  helical interface sequence
QGALANIAVDKANLEIMTKRS

SEQ ID NO: 16752 - protein, 22 aa, Artificial
  helical interface sequence
AQGALANIAVDKANLEIMTKRS

SEQ ID NO: 16753 - protein, 29 aa, Artificial
  helical interface sequence
MEDLVTYTKNLGPGMTKMAKMIDERQQEL

SEQ ID NO: 16754 - protein, 8 aa, Artificial
  helical interface sequence
PHEIQEAN

SEQ ID NO: 16755 - protein, 9 aa, Artificial
  helical interface sequence
RPDAEYWNS

SEQ ID NO: 16756 - protein, 27 aa, Artificial
  helical interface sequence
VEQIKRNIAILDEIMAKADNDLSYFIS

SEQ ID NO: 16757 - protein, 12 aa, Artificial
  helical interface sequence
KEKLEATINELV

SEQ ID NO: 16758 - protein, 10 aa, Artificial
  helical interface sequence
RSERKKWIHC

SEQ ID NO: 16759 - protein, 21 aa, Artificial
  helical interface sequence
PDTFDKYYRPRYEYLAKEAAA

SEQ ID NO: 16760 - protein, 12 aa, Artificial
  helical interface sequence
AMDVVYALKRQG

SEQ ID NO: 16761 - protein, 6 aa, Artificial
  helical interface sequence
SEQLTS

SEQ ID NO: 16762 - protein, 6 aa, Artificial
  helical interface sequence
FNNNLY

SEQ ID NO: 16763 - protein, 12 aa, Artificial
  helical interface sequence
DIRILRDIEQYY

SEQ ID NO: 16764 - protein, 20 aa, Artificial
  helical interface sequence
QAQETQGQAAARAAAADLAA

SEQ ID NO: 16765 - protein, 20 aa, Artificial
  helical interface sequence
QAQETQGQAAARAAAADLAA

SEQ ID NO: 16766 - protein, 20 aa, Artificial
  helical interface sequence
QAQETQGQAAARAAAADLAA

SEQ ID NO: 16767 - protein, 10 aa, Artificial
  helical interface sequence
RNEMRALVCG

SEQ ID NO: 16768 - protein, 5 aa, Artificial
  helical interface sequence
RNEMR

SEQ ID NO: 16769 - protein, 8 aa, Artificial
  helical interface sequence
QEKAQALG

SEQ ID NO: 16770 - protein, 13 aa, Artificial
  helical interface sequence
DLGKKLLEAARAG

SEQ ID NO: 16771 - protein, 14 aa, Artificial
  helical interface sequence
PKELVARIKAVMRR

SEQ ID NO: 16772 - protein, 5 aa, Artificial
  helical interface sequence
GWWLD

SEQ ID NO: 16773 - protein, 15 aa, Artificial
  helical interface sequence
LTMTRNAVWALSNLC

SEQ ID NO: 16774 - protein, 10 aa, Artificial
  helical interface sequence
GVVQETLNMS

SEQ ID NO: 16775 - protein, 70 aa, Artificial; identical to SEQ ID NO: 7956
  helical interface sequence

SEQ ID NO: 16776 - protein, 15 aa, Artificial
  helical interface sequence
LSKQAVAYRQMSLLL

SEQ ID NO: 16777 - protein, 69 aa, Artificial; identical to SEQ ID NO: 2946
  helical interface sequence

SEQ ID NO: 16778 - protein, 9 aa, Artificial
  helical interface sequence
GDKVKPVLL

SEQ ID NO: 16779 - protein, 16 aa, Artificial
  helical interface sequence
RDEFAVAMFLVYCALE

SEQ ID NO: 16780 - protein, 18 aa, Artificial
  helical interface sequence
LRAYIRKQINNIFYRFIY

SEQ ID NO: 16781 - protein, 13 aa, Artificial
  helical interface sequence
TVALREIRRYQKS

SEQ ID NO: 16782 - protein, 12 aa, Artificial
  helical interface sequence
PKDIQLARRIRG

SEQ ID NO: 16783 - protein, 7 aa, Artificial
  helical interface sequence
EELNKLL

SEQ ID NO: 16784 - protein, 15 aa, Artificial
  helical interface sequence
ESVLNVIAADVTLVG

SEQ ID NO: 16785 - protein, 19 aa, Artificial
  helical interface sequence
EHKVLDLKNRIEASVVIWK

SEQ ID NO: 16786 - protein, 30 aa, Artificial
  helical interface sequence
VGQAVLESYSRILESLAYTVMSRIEDVLYT

SEQ ID NO: 16787 - protein, 20 aa, Artificial
  helical interface sequence
QDRQARWKKEIDWLLSVTDH

SEQ ID NO: 16788 - protein, 20 aa, Artificial
  helical interface sequence
LLGACSGAIAGLVGVTPACG

SEQ ID NO: 16789 - protein, 7 aa, Artificial
  helical interface sequence
EEQEREG

SEQ ID NO: 16790 - protein, 11 aa, Artificial
  helical interface sequence
AEQAKIAEEAG

SEQ ID NO: 16791 - protein, 24 aa, Artificial
  helical interface sequence
SGKYIKLQNVYREKAKKDAAAVGN

SEQ ID NO: 16792 - protein, 29 aa, Artificial
  helical interface sequence
PEYWDRNTQIFKTNTQTYRESLRNLRGYY

SEQ ID NO: 16793 - protein, 9 aa, Artificial
  helical interface sequence
TCPCYYKYS

SEQ ID NO: 16794 - protein, 7 aa, Artificial
  helical interface sequence
EELNKLL

SEQ ID NO: 16795 - protein, 7 aa, Artificial
  helical interface sequence
SLMFLFS

SEQ ID NO: 16796 - protein, 12 aa, Artificial
  helical interface sequence
FPEFLTMMARKM

SEQ ID NO: 16797 - protein, 8 aa, Artificial
  helical interface sequence
EMNILATL

SEQ ID NO: 16798 - protein, 14 aa, Artificial
  helical interface sequence
IKLARQLISKDLHD

SEQ ID NO: 16799 - protein, 8 aa, Artificial
  helical interface sequence
EMNILATL

SEQ ID NO: 16800 - protein, 16 aa, Artificial
  helical interface sequence
TFMAEMLETASILRSA

SEQ ID NO: 16801 - protein, 7 aa, Artificial
  helical interface sequence
HSLVEDY

SEQ ID NO: 16802 - protein, 15 aa, Artificial
  helical interface sequence
EENLEFWLACEEFKK

SEQ ID NO: 16803 - protein, 7 aa, Artificial
  helical interface sequence
LYQLENY

SEQ ID NO: 16804 - protein, 7 aa, Artificial
  helical interface sequence
LYQLENY

SEQ ID NO: 16805 - protein, 13 aa, Artificial
  helical interface sequence
PLRVFFTVSLPLS

SEQ ID NO: 16806 - protein, 11 aa, Artificial
  helical interface sequence
RAEAEEHLKLA

SEQ ID NO: 16807 - protein, 14 aa, Artificial
  helical interface sequence
ALVRSITCWTLSRY

SEQ ID NO: 16808 - protein, 15 aa, Artificial
  helical interface sequence
QLAELQWQRQQEWRN

SEQ ID NO: 16809 - protein, 9 aa, Artificial
  helical interface sequence
SKCENNADL

SEQ ID NO: 16810 - protein, 10 aa, Artificial
  helical interface sequence
KTCLLISYTT

SEQ ID NO: 16811 - protein, 9 aa, Artificial
  helical interface sequence
HLPLLCEDK

SEQ ID NO: 16812 - protein, 21 aa, Artificial
  helical interface sequence
RRKAARLVAAKCTLAARVDSF

SEQ ID NO: 16813 - protein, 5 aa, Artificial
  helical interface sequence
YRRAF

SEQ ID NO: 16814 - protein, 18 aa, Artificial
  helical interface sequence
RILESKYVASWQDYHSEF

SEQ ID NO: 16815 - protein, 19 aa, Artificial
  helical interface sequence
QVEKEMLQVGEKRLNELLE

SEQ ID NO: 16816 - protein, 32 aa, Artificial; identical to SEQ ID NO: 1420
  helical interface sequence

SEQ ID NO: 16817 - protein, 9 aa, Artificial
  helical interface sequence
IDIRKDLYA

SEQ ID NO: 16818 - protein, 19 aa, Artificial
  helical interface sequence
YAIREAATSNLKKLVEKFG

SEQ ID NO: 16819 - protein, 16 aa, Artificial
  helical interface sequence
EKDIAAYIKKEFDKKY

SEQ ID NO: 16820 - protein, 11 aa, Artificial
  helical interface sequence
EEAIAEAKEIM

SEQ ID NO: 16821 - protein, 5 aa, Artificial
  helical interface sequence
RFRGN

SEQ ID NO: 16822 - protein, 6 aa, Artificial
  helical interface sequence
INEVIH

SEQ ID NO: 16823 - protein, 16 aa, Artificial
  helical interface sequence
RYEIARVISARALQLA

SEQ ID NO: 16824 - protein, 7 aa, Artificial
  helical interface sequence
IRRASML

SEQ ID NO: 16825 - protein, 22 aa, Artificial
  helical interface sequence
WGRIVAFFSFGGALCVESVDKE

SEQ ID NO: 16826 - protein, 14 aa, Artificial
  helical interface sequence
PQQLEILRQQVVSE

SEQ ID NO: 16827 - protein, 8 aa, Artificial
  helical interface sequence
PLLQEIYK

SEQ ID NO: 16828 - protein, 6 aa, Artificial
  helical interface sequence
VPMRER

SEQ ID NO: 16829 - protein, 8 aa, Artificial
  helical interface sequence
KEAEVKNT

SEQ ID NO: 16830 - protein, 7 aa, Artificial
  helical interface sequence
GIFAQAL

SEQ ID NO: 16831 - protein, 17 aa, Artificial
  helical interface sequence
GPSKAMAPKYEKLAEEY

SEQ ID NO: 16832 - protein, 22 aa, Artificial
  helical interface sequence
LERTRAELDTVCRYNYEETEVP

SEQ ID NO: 16833 - protein, 7 aa, Artificial
  helical interface sequence
MWERVKS

SEQ ID NO: 16834 - protein, 6 aa, Artificial
  helical interface sequence
VKSIIK

SEQ ID NO: 16835 - protein, 5 aa, Artificial
  helical interface sequence
PEIVT

SEQ ID NO: 16836 - protein, 9 aa, Artificial
  helical interface sequence
VFYLHSRLL

SEQ ID NO: 16837 - protein, 9 aa, Artificial
  helical interface sequence
PGGKTVRRS

SEQ ID NO: 16838 - protein, 6 aa, Artificial
  helical interface sequence
EIKDIL

SEQ ID NO: 16839 - protein, 13 aa, Artificial
  helical interface sequence
NHAIVQTLVNSVN

SEQ ID NO: 16840 - protein, 17 aa, Artificial
  helical interface sequence
QMSFWGATVITGLFGAI

SEQ ID NO: 16841 - protein, 9 aa, Artificial
  helical interface sequence
HSIQTWLLG

SEQ ID NO: 16842 - protein, 24 aa, Artificial
  helical interface sequence
IWGVVLAFCLVLQIVTGIVLAMHY

SEQ ID NO: 16843 - protein, 17 aa, Artificial
  helical interface sequence
QMSFWGATVITGLFGAI

SEQ ID NO: 16844 - protein, 28 aa, Artificial
  helical interface sequence
RRDFLYYATAGAGAVATGAAVWPLINQM

SEQ ID NO: 16845 - protein, 22 aa, Artificial
  helical interface sequence
PMFKIYFWLLAADFVILTWVGA

SEQ ID NO: 16846 - protein, 11 aa, Artificial
  helical interface sequence
QYRILKFVALN

SEQ ID NO: 16847 - protein, 19 aa, Artificial
  helical interface sequence
PVNFKLLGQCFLVVVAIHH

SEQ ID NO: 16848 - protein, 16 aa, Artificial
  helical interface sequence
KEEALSQYRQIKQFTK

SEQ ID NO: 16849 - protein, 19 aa, Artificial
  helical interface sequence
GGVQEDALMAVSTLVEVLG

SEQ ID NO: 16850 - protein, 17 aa, Artificial
  helical interface sequence
AKYQRQLARAIKRARYL

SEQ ID NO: 16851 - protein, 14 aa, Artificial
  helical interface sequence
PFAAQVAAERCADA

SEQ ID NO: 16852 - protein, 13 aa, Artificial
  helical interface sequence
PSVIKGIAQQAVG

SEQ ID NO: 16853 - protein, 7 aa, Artificial
  helical interface sequence
DEQLKSG

SEQ ID NO: 16854 - protein, 8 aa, Artificial
  helical interface sequence
FMDVYQRS

SEQ ID NO: 16855 - protein, 13 aa, Artificial
  helical interface sequence
VEDLLSLRQVVSG

SEQ ID NO: 16856 - protein, 8 aa, Artificial
  helical interface sequence
MFSHLRRI

SEQ ID NO: 16857 - protein, 11 aa, Artificial
  helical interface sequence
VSYLSELADAV

SEQ ID NO: 16858 - protein, 14 aa, Artificial
  helical interface sequence
SMEIMEAYSVARQF

SEQ ID NO: 16859 - protein, 5 aa, Artificial
  helical interface sequence
LQHYK

SEQ ID NO: 16860 - protein, 22 aa, Artificial
  helical interface sequence
TENIRFVFAAVKDTILQLNLKE

SEQ ID NO: 16861 - protein, 5 aa, Artificial
  helical interface sequence
KHWLR

SEQ ID NO: 16862 - protein, 6 aa, Artificial
  helical interface sequence
VRFLEQ

SEQ ID NO: 16863 - protein, 31 aa, Artificial; identical to SEQ ID NO: 6700
  helical interface sequence

SEQ ID NO: 16864 - protein, 33 aa, Artificial; identical to SEQ ID NO: 6996
  helical interface sequence

SEQ ID NO: 16865 - protein, 8 aa, Artificial
  helical interface sequence
IDEVNRTF

SEQ ID NO: 16866 - protein, 8 aa, Artificial
  helical interface sequence
IDEVNRTF

SEQ ID NO: 16867 - protein, 12 aa, Artificial
  helical interface sequence
ANLSLATIEMTY

SEQ ID NO: 16868 - protein, 6 aa, Artificial
  helical interface sequence
SEQLTS

SEQ ID NO: 16869 - protein, 6 aa, Artificial
  helical interface sequence
SEQLTS

SEQ ID NO: 16870 - protein, 10 aa, Artificial
  helical interface sequence
IGEFDTLVRK

SEQ ID NO: 16871 - protein, 10 aa, Artificial
  helical interface sequence
IGEFDTLVRK

SEQ ID NO: 16872 - protein, 7 aa, Artificial
  helical interface sequence
PPCILNN

SEQ ID NO: 16873 - protein, 9 aa, Artificial
  helical interface sequence
FQAISDVIG

SEQ ID NO: 16874 - protein, 11 aa, Artificial
  helical interface sequence
WGRVAMAIGKC

SEQ ID NO: 16875 - protein, 6 aa, Artificial
  helical interface sequence
QNLVSN

SEQ ID NO: 16876 - protein, 28 aa, Artificial
  helical interface sequence
SEHYDVARGVQKILQDYKSLQDIIAILG

SEQ ID NO: 16877 - protein, 28 aa, Artificial
  helical interface sequence
SEHYDVARGVQKILQDYKSLQDIIAILG

SEQ ID NO: 16878 - protein, 5 aa, Artificial
  helical interface sequence
YWRQA

SEQ ID NO: 16879 - protein, 5 aa, Artificial
  helical interface sequence
YWRQA

SEQ ID NO: 16880 - protein, 10 aa, Artificial
  helical interface sequence
ERVVTSAREH

SEQ ID NO: 16881 - protein, 10 aa, Artificial
  helical interface sequence
VNLYQNYSEL

SEQ ID NO: 16882 - protein, 15 aa, Artificial
  helical interface sequence
NYVVQEAIVVIRDIF

SEQ ID NO: 16883 - protein, 8 aa, Artificial
  helical interface sequence
FQALCVLD

SEQ ID NO: 16884 - protein, 10 aa, Artificial
  helical interface sequence
TTTRYHQEKN

SEQ ID NO: 16885 - protein, 7 aa, Artificial
  helical interface sequence
ALEVAEK

SEQ ID NO: 16886 - protein, 5 aa, Artificial
  helical interface sequence
DTCMA

SEQ ID NO: 16887 - protein, 14 aa, Artificial
  helical interface sequence
RQAASLIRVAAAVG

SEQ ID NO: 16888 - protein, 14 aa, Artificial
  helical interface sequence
RQAASLIRVAAAVG

SEQ ID NO: 16889 - protein, 9 aa, Artificial
  helical interface sequence
AFDTLFDHA

SEQ ID NO: 16890 - protein, 7 aa, Artificial
  helical interface sequence
LKTVFDE

SEQ ID NO: 16891 - protein, 29 aa, Artificial
  helical interface sequence
FPEFLTMMARKMKDTDSEEEIREAFRVFD

SEQ ID NO: 16892 - protein, 11 aa, Artificial
  helical interface sequence
IEQLQNEILKY

SEQ ID NO: 16893 - protein, 6 aa, Artificial
  helical interface sequence
RSSVER

SEQ ID NO: 16894 - protein, 8 aa, Artificial
  helical interface sequence
KEEAQQIL

SEQ ID NO: 16895 - protein, 6 aa, Artificial
  helical interface sequence
FAYVMA

SEQ ID NO: 16896 - protein, 11 aa, Artificial
  helical interface sequence
EEAIAEAKEIM

SEQ ID NO: 16897 - protein, 5 aa, Artificial
  helical interface sequence
PSAAR

SEQ ID NO: 16898 - protein, 19 aa, Artificial
  helical interface sequence
IEAAREIIIREISKVLAEQ

SEQ ID NO: 16899 - protein, 23 aa, Artificial
  helical interface sequence
EMEFTEAESNMNDLVSEYQQYQD

SEQ ID NO: 16900 - protein, 8 aa, Artificial
  helical interface sequence
YEEFVQMM

SEQ ID NO: 16901 - protein, 5 aa, Artificial
  helical interface sequence
WEKFG

SEQ ID NO: 16902 - protein, 6 aa, Artificial
  helical interface sequence
QLAANH

SEQ ID NO: 16903 - protein, 11 aa, Artificial
  helical interface sequence
ASQAEECAQDV

SEQ ID NO: 16904 - protein, 10 aa, Artificial
  helical interface sequence
DALLTAYAAG

SEQ ID NO: 16905 - protein, 10 aa, Artificial
  helical interface sequence
QENARLGRAI

SEQ ID NO: 16906 - protein, 16 aa, Artificial
  helical interface sequence
DNYLKEVINQVEEETG

SEQ ID NO: 16907 - protein, 5 aa, Artificial
  helical interface sequence
YKRIY

SEQ ID NO: 16908 - protein, 14 aa, Artificial
  helical interface sequence
FGAHMANPLLRKVV

SEQ ID NO: 16909 - protein, 19 aa, Artificial
  helical interface sequence
VEDALYLGKRSILAAAHRD

SEQ ID NO: 16910 - protein, 15 aa, Artificial
  helical interface sequence
TETAASVFKELCYEN

SEQ ID NO: 16911 - protein, 9 aa, Artificial
  helical interface sequence
PEEVEEVIG

SEQ ID NO: 16912 - protein, 5 aa, Artificial
  helical interface sequence
AYLAL

SEQ ID NO: 16913 - protein, 6 aa, Artificial
  helical interface sequence
ARQLMQ

SEQ ID NO: 16914 - protein, 13 aa, Artificial
  helical interface sequence
IENVKAKIQDKEG

SEQ ID NO: 16915 - protein, 5 aa, Artificial
  helical interface sequence
SRWWC

SEQ ID NO: 16916 - protein, 6 aa, Artificial
  helical interface sequence
IESRTV

SEQ ID NO: 16917 - protein, 9 aa, Artificial
  helical interface sequence
PRGWFTFAH

SEQ ID NO: 16918 - protein, 9 aa, Artificial
  helical interface sequence
AIFDPLVDV

SEQ ID NO: 16919 - protein, 9 aa, Artificial
  helical interface sequence
TITYVFIFA

SEQ ID NO: 16920 - protein, 10 aa, Artificial
  helical interface sequence
GHILREMVHT

SEQ ID NO: 16921 - protein, 26 aa, Artificial
  helical interface sequence
LVSAHRDRDRQKRDFRRLWITRINAA

SEQ ID NO: 16922 - protein, 10 aa, Artificial
  helical interface sequence
TEKLYKEVRQ

SEQ ID NO: 16923 - protein, 9 aa, Artificial
  helical interface sequence
EHVVDTCRK

SEQ ID NO: 16924 - protein, 15 aa, Artificial
  helical interface sequence
HASDVLLNLNRLRSR

SEQ ID NO: 16925 - protein, 11 aa, Artificial
  helical interface sequence
KYHLLLQELVK

SEQ ID NO: 16926 - protein, 5 aa, Artificial
  helical interface sequence
YGPAL

SEQ ID NO: 16927 - protein, 15 aa, Artificial
  helical interface sequence
SMYGTILGNIGAALI

SEQ ID NO: 16928 - protein, 11 aa, Artificial
  helical interface sequence
VDNASMQAVAK

SEQ ID NO: 16929 - protein, 15 aa, Artificial
  helical interface sequence
SMYGTILGNIGAALI

SEQ ID NO: 16930 - protein, 6 aa, Artificial
  helical interface sequence
EKFAKL

SEQ ID NO: 16931 - protein, 17 aa, Artificial
  helical interface sequence
YGDFRQIRDIMQALLVR

SEQ ID NO: 16932 - protein, 7 aa, Artificial
  helical interface sequence
SEQLTSG

SEQ ID NO: 16933 - protein, 10 aa, Artificial
  helical interface sequence
LQPCFEDLGN

SEQ ID NO: 16934 - protein, 23 aa, Artificial
  helical interface sequence
VADARVLVDFARISAQQEKVTYG

SEQ ID NO: 16935 - protein, 9 aa, Artificial
  helical interface sequence
DALFNELVK

SEQ ID NO: 16936 - protein, 22 aa, Artificial
  helical interface sequence
QKELSKYSTHLHLAEDCMKHYQ

SEQ ID NO: 16937 - protein, 33 aa, Artificial
  helical interface sequence
DEFFEQVEEIRGFIDKIAENVEEVKRKHSAILA

SEQ ID NO: 16938 - protein, 12 aa, Artificial
  helical interface sequence
TTDWMFLTLLFL

SEQ ID NO: 16939 - protein, 14 aa, Artificial
  helical interface sequence
AVLGGYHIHFMLTA

SEQ ID NO: 16940 - protein, 5 aa, Artificial
  helical interface sequence
PSHII

SEQ ID NO: 16941 - protein, 8 aa, Artificial
  helical interface sequence
TIIGYAVT

SEQ ID NO: 16942 - protein, 14 aa, Artificial
  helical interface sequence
AVLGGYHIHFMLTA

SEQ ID NO: 16943 - protein, 5 aa, Artificial
  helical interface sequence
PSHII

SEQ ID NO: 16944 - protein, 8 aa, Artificial
  helical interface sequence
TIIGYAVT

SEQ ID NO: 16945 - protein, 14 aa, Artificial
  helical interface sequence
AVLGGYHIHFMLTA

SEQ ID NO: 16946 - protein, 5 aa, Artificial
  helical interface sequence
PSHII

SEQ ID NO: 16947 - protein, 13 aa, Artificial
  helical interface sequence
ILNRKAIDFLLQR

SEQ ID NO: 16948 - protein, 17 aa, Artificial
  helical interface sequence
TQVLQYIYSHIYVKYVS

SEQ ID NO: 16949 - protein, 23 aa, Artificial
  helical interface sequence
AGDFETKLSDYGHNIGIRLLELL

SEQ ID NO: 16950 - protein, 6 aa, Artificial
  helical interface sequence
LSQYRQ

SEQ ID NO: 16951 - protein, 23 aa, Artificial
  helical interface sequence
WNFGSLLAVCLMTQILTGLLLAM

SEQ ID NO: 16952 - protein, 7 aa, Artificial
  helical interface sequence
YMRIRSD

SEQ ID NO: 16953 - protein, 21 aa, Artificial
  helical interface sequence
PHELTESVLPAARYDYAVAEQ

SEQ ID NO: 16954 - protein, 21 aa, Artificial
  helical interface sequence
YLLPYILEAEAAAKEKDELDN

SEQ ID NO: 16955 - protein, 11 aa, Artificial
  helical interface sequence
LGEAFKKIDAI

SEQ ID NO: 16956 - protein, 21 aa, Artificial
  helical interface sequence
YLLPYILEAEAAAKEKDELDN

SEQ ID NO: 16957 - protein, 32 aa, Artificial; identical to SEQ ID NO: 6965
  helical interface sequence

SEQ ID NO: 16958 - protein, 23 aa, Artificial
  helical interface sequence
EEGKALVHHYEECAERVKIQQQQ

SEQ ID NO: 16959 - protein, 9 aa, Artificial
  helical interface sequence
KLFLEMLEA

SEQ ID NO: 16960 - protein, 14 aa, Artificial
  helical interface sequence
DGIIEGIADYGNSI

SEQ ID NO: 16961 - protein, 8 aa, Artificial
  helical interface sequence
EQLVIEFY

SEQ ID NO: 16962 - protein, 6 aa, Artificial
  helical interface sequence
NVALPR

SEQ ID NO: 16963 - protein, 6 aa, Artificial
  helical interface sequence
DEQLKS

SEQ ID NO: 16964 - protein, 9 aa, Artificial
  helical interface sequence
ATGTEILKN

SEQ ID NO: 16965 - protein, 22 aa, Artificial
  helical interface sequence
NYQVEEDIGKLKSCLTGFLQEY

SEQ ID NO: 16966 - protein, 7 aa, Artificial
  helical interface sequence
ILFKIFK

SEQ ID NO: 16967 - protein, 31 aa, Artificial
  helical interface sequence
AISVAIMLTFSFETGFTNMQFLGLAADAAEA

SEQ ID NO: 16968 - protein, 20 aa, Artificial
  helical interface sequence
PENFRLLGDILVIILAAHFG

SEQ ID NO: 16969 - protein, 27 aa, Artificial
  helical interface sequence
LLPEALPGLVNAATITLITLVGYSAMG

SEQ ID NO: 16970 - protein, 6 aa, Artificial
  helical interface sequence
SEQLTS

SEQ ID NO: 16971 - protein, 22 aa, Artificial
  helical interface sequence
GTSALIAVGVALDIIQQMETHM

SEQ ID NO: 16972 - protein, 18 aa, Artificial
  helical interface sequence
VMSSAFVGFLATIANFIG

SEQ ID NO: 16973 - protein, 20 aa, Artificial
  helical interface sequence
DFNQKIEQLKEFIEECRRVW

SEQ ID NO: 16974 - protein, 13 aa, Artificial
  helical interface sequence
RAKWNNTLKQIAS

SEQ ID NO: 16975 - protein, 13 aa, Artificial
  helical interface sequence
RAKWNNTLKQIAS

SEQ ID NO: 16976 - protein, 13 aa, Artificial
  helical interface sequence
RAKWNNTLKQIAS

SEQ ID NO: 16977 - protein, 6 aa, Artificial
  helical interface sequence
IFGDRI

SEQ ID NO: 16978 - protein, 6 aa, Artificial
  helical interface sequence
ELLPFL

SEQ ID NO: 16979 - protein, 29 aa, Artificial
  helical interface sequence
PEYWDRETQISKTNTQTYRENLRTALRYY

SEQ ID NO: 16980 - protein, 29 aa, Artificial
  helical interface sequence
PEYWDRETQISKTNTQTYRENLRTALRYY

SEQ ID NO: 16981 - protein, 7 aa, Artificial
  helical interface sequence
RFAKLLL

SEQ ID NO: 16982 - protein, 18 aa, Artificial
  helical interface sequence
KAVDWWALGVLIYEMAAG

SEQ ID NO: 16983 - protein, 18 aa, Artificial
  helical interface sequence
KAVDWWALGVLIYEMAAG

SEQ ID NO: 16984 - protein, 15 aa, Artificial
  helical interface sequence
TDVDAANLRETFRNL

SEQ ID NO: 16985 - protein, 11 aa, Artificial
  helical interface sequence
KRWIQKVIDQF

SEQ ID NO: 16986 - protein, 36 aa, Artificial; identical to SEQ ID NO: 1711
  helical interface sequence

SEQ ID NO: 16987 - protein, 14 aa, Artificial
  helical interface sequence
KGALAVILVLTLTI

SEQ ID NO: 16988 - protein, 15 aa, Artificial
  helical interface sequence
VQARAALDKATVLLS

SEQ ID NO: 16989 - protein, 28 aa, Artificial
  helical interface sequence
RKALTEGNIMAVQAMAYFKELIQKRKRH

SEQ ID NO: 16990 - protein, 12 aa, Artificial
  helical interface sequence
NGHLKVLQQLID

SEQ ID NO: 16991 - protein, 14 aa, Artificial
  helical interface sequence
ELDMMVGKILCYLY

SEQ ID NO: 16992 - protein, 17 aa, Artificial
  helical interface sequence
GVAYRTREEIQEVRSKS

SEQ ID NO: 16993 - protein, 6 aa, Artificial
  helical interface sequence
KILEDN

SEQ ID NO: 16994 - protein, 14 aa, Artificial
  helical interface sequence
EMGFAGIAVGAAMA

SEQ ID NO: 16995 - protein, 13 aa, Artificial
  helical interface sequence
GQIFEAYNMAALW

SEQ ID NO: 16996 - protein, 24 aa, Artificial
  helical interface sequence
VEELKEIDVEVRKEIEDAAQFATA

SEQ ID NO: 16997 - protein, 13 aa, Artificial
  helical interface sequence
GQIFEAYNMAALW

SEQ ID NO: 16998 - protein, 7 aa, Artificial
  helical interface sequence
DEQLKSG

SEQ ID NO: 16999 - protein, 5 aa, Artificial
  helical interface sequence
QNRSG

SEQ ID NO: 17000 - protein, 15 aa, Artificial
  helical interface sequence
PLSIALAMGMMELGA

SEQ ID NO: 17001 - protein, 15 aa, Artificial
  helical interface sequence
PLSIALAMGMMELGA

SEQ ID NO: 17002 - protein, 12 aa, Artificial
  helical interface sequence
LVEFDKVFRQAS

SEQ ID NO: 17003 - protein, 9 aa, Artificial
  helical interface sequence
PRKVRLVVD

SEQ ID NO: 17004 - protein, 10 aa, Artificial
  helical interface sequence
TEMITTLKKI

SEQ ID NO: 17005 - protein, 10 aa, Artificial
  helical interface sequence
TEMITTLKKI

SEQ ID NO: 17006 - protein, 16 aa, Artificial
  helical interface sequence
VKEVMHYLGQYIMVKQ

SEQ ID NO: 17007 - protein, 20 aa, Artificial
  helical interface sequence
PENFRLLGNVLVCVLARHFG

SEQ ID NO: 17008 - protein, 6 aa, Artificial
  helical interface sequence
ELALIY

SEQ ID NO: 17009 - protein, 10 aa, Artificial
  helical interface sequence
GNDLYREMKE

SEQ ID NO: 17010 - protein, 12 aa, Artificial
  helical interface sequence
LKLFLAQYREVA

SEQ ID NO: 17011 - protein, 15 aa, Artificial
  helical interface sequence
TREGNDLYREMKETG

SEQ ID NO: 17012 - protein, 8 aa, Artificial
  helical interface sequence
PAPATTFA

SEQ ID NO: 17013 - protein, 14 aa, Artificial
  helical interface sequence
RSTVAQLVQTLEQH

SEQ ID NO: 17014 - protein, 14 aa, Artificial
  helical interface sequence
FQESALIADKLLSV

SEQ ID NO: 17015 - protein, 10 aa, Artificial
  helical interface sequence
PAPATTFAHL

SEQ ID NO: 17016 - protein, 15 aa, Artificial
  helical interface sequence
LSKQAVAYRQLSLLL

SEQ ID NO: 17017 - protein, 28 aa, Artificial
  helical interface sequence
LKEVEMRLKSIKNIEKITKTMKIVASTR

SEQ ID NO: 17018 - protein, 10 aa, Artificial
  helical interface sequence
YEELKHLLSR

SEQ ID NO: 17019 - protein, 15 aa, Artificial
  helical interface sequence
LDELFLKLFTPILKT

SEQ ID NO: 17020 - protein, 18 aa, Artificial
  helical interface sequence
RELMETGRSVVQKYLNDC

SEQ ID NO: 17021 - protein, 8 aa, Artificial
  helical interface sequence
PGTVLDWC

SEQ ID NO: 17022 - protein, 19 aa, Artificial
  helical interface sequence
PVNFKLLGQCFLVVVAIHH

SEQ ID NO: 17023 - protein, 20 aa, Artificial
  helical interface sequence
PENFRLLGDILIIVLAAHFT

SEQ ID NO: 17024 - protein, 15 aa, Artificial
  helical interface sequence
IISPVKDCILTVAKA

SEQ ID NO: 17025 - protein, 11 aa, Artificial
  helical interface sequence
RCELAAAMKRH

SEQ ID NO: 17026 - protein, 11 aa, Artificial
  helical interface sequence
EAELQDMINEV

SEQ ID NO: 17027 - protein, 15 aa, Artificial
  helical interface sequence
EEQIAEFKEAFSLFD

SEQ ID NO: 17028 - protein, 17 aa, Artificial
  helical interface sequence
TALRELIEELVNITQNQ

SEQ ID NO: 17029 - protein, 17 aa, Artificial
  helical interface sequence
PYITNRTFMLAKEASLA

SEQ ID NO: 17030 - protein, 14 aa, Artificial
  helical interface sequence
WGRCWDVITENVLN

SEQ ID NO: 17031 - protein, 43 aa, Artificial; identical to SEQ ID NO: 7271
  helical interface sequence

SEQ ID NO: 17032 - protein, 14 aa, Artificial
  helical interface sequence
VEAVSQTSSSSFQY

SEQ ID NO: 17033 - protein, 22 aa, Artificial
  helical interface sequence
YLDMLNVYKCLSENISAAIQAN

SEQ ID NO: 17034 - protein, 20 aa, Artificial
  helical interface sequence
DEQNFIQNLSLFLCTFLKEH

SEQ ID NO: 17035 - protein, 6 aa, Artificial
  helical interface sequence
DEQLKS

SEQ ID NO: 17036 - protein, 10 aa, Artificial
  helical interface sequence
LRDALSLTDQ

SEQ ID NO: 17037 - protein, 25 aa, Artificial
  helical interface sequence
PVILLRTLQRELLLLVNLKRQSAHT

SEQ ID NO: 17038 - protein, 17 aa, Artificial
  helical interface sequence
PTDIQLYYQTLLIGRKE

SEQ ID NO: 17039 - protein, 17 aa, Artificial
  helical interface sequence
VAHLIECLLSKVAALSG

SEQ ID NO: 17040 - protein, 10 aa, Artificial
  helical interface sequence
FINIAQMSAC

SEQ ID NO: 17041 - protein, 13 aa, Artificial
  helical interface sequence
TPVFHTGQCQLRL

SEQ ID NO: 17042 - protein, 11 aa, Artificial
  helical interface sequence
IIAPSEASSNL

SEQ ID NO: 17043 - protein, 13 aa, Artificial
  helical interface sequence
IFEMYARTRDEGF

SEQ ID NO: 17044 - protein, 7 aa, Artificial
  helical interface sequence
REKALMN

SEQ ID NO: 17045 - protein, 6 aa, Artificial
  helical interface sequence
SIPTYY

SEQ ID NO: 17046 - protein, 20 aa, Artificial
  helical interface sequence
DIIAAAKRMALLMAEMSRLV

SEQ ID NO: 17047 - protein, 9 aa, Artificial
  helical interface sequence
DEESEQATE

SEQ ID NO: 17048 - protein, 41 aa, Artificial; identical to SEQ ID NO: 878
  helical interface sequence

SEQ ID NO: 17049 - protein, 6 aa, Artificial
  helical interface sequence
LYKMRT

SEQ ID NO: 17050 - protein, 23 aa, Artificial
  helical interface sequence
YQGWQTQWNQALEDLVRAYQSMS

SEQ ID NO: 17051 - protein, 29 aa, Artificial
  helical interface sequence
PEYWDGETRKVKAHSQTHRVDLGTLRGYY

SEQ ID NO: 17052 - protein, 10 aa, Artificial
  helical interface sequence
AHLPPLCEEK

SEQ ID NO: 17053 - protein, 12 aa, Artificial
  helical interface sequence
SWLDLPIKVLNA

SEQ ID NO: 17054 - protein, 6 aa, Artificial
  helical interface sequence
YNQARV

SEQ ID NO: 17055 - protein, 9 aa, Artificial
  helical interface sequence
YMQRRLINA

SEQ ID NO: 17056 - protein, 13 aa, Artificial
  helical interface sequence
YAFKLLIQELMSM

SEQ ID NO: 17057 - protein, 7 aa, Artificial
  helical interface sequence
PRNTYQS

SEQ ID NO: 17058 - protein, 8 aa, Artificial
  helical interface sequence
VVENIIIG

SEQ ID NO: 17059 - protein, 8 aa, Artificial
  helical interface sequence
PEEVRAIS

SEQ ID NO: 17060 - protein, 21 aa, Artificial
  helical interface sequence
VLLDEEYKQLVKDRKFLREVF

SEQ ID NO: 17061 - protein, 11 aa, Artificial
  helical interface sequence
ESTQLLMKYLG

SEQ ID NO: 17062 - protein, 8 aa, Artificial
  helical interface sequence
REESTTVS

SEQ ID NO: 17063 - protein, 7 aa, Artificial
  helical interface sequence
SLEKVMG

SEQ ID NO: 17064 - protein, 8 aa, Artificial
  helical interface sequence
REESTTVS

SEQ ID NO: 17065 - protein, 13 aa, Artificial
  helical interface sequence
GPAVITRATVHCM

SEQ ID NO: 17066 - protein, 19 aa, Artificial
  helical interface sequence
PAVHASLDKFLASVSTVLT

SEQ ID NO: 17067 - protein, 5 aa, Artificial
  helical interface sequence
PRAKG

SEQ ID NO: 17068 - protein, 7 aa, Artificial
  helical interface sequence
KGSCERD

SEQ ID NO: 17069 - protein, 22 aa, Artificial
  helical interface sequence
PAEKEKLQIFLASELLLRRKAR

SEQ ID NO: 17070 - protein, 5 aa, Artificial
  helical interface sequence
VPEMI

SEQ ID NO: 17071 - protein, 6 aa, Artificial
  helical interface sequence
SEQLTS

SEQ ID NO: 17072 - protein, 16 aa, Artificial
  helical interface sequence
FEDLKENLIREYVKQT

SEQ ID NO: 17073 - protein, 19 aa, Artificial
  helical interface sequence
PAVHASLDKFLASVSTVLT

SEQ ID NO: 17074 - protein, 19 aa, Artificial
  helical interface sequence
PVNFKLLSHCLLVTLAAHL

SEQ ID NO: 17075 - protein, 7 aa, Artificial
  helical interface sequence
DEQLKSG

SEQ ID NO: 17076 - protein, 14 aa, Artificial
  helical interface sequence
DEAQKKIFNLMEKD

SEQ ID NO: 17077 - protein, 6 aa, Artificial
  helical interface sequence
KDCLIG

SEQ ID NO: 17078 - protein, 9 aa, Artificial
  helical interface sequence
QDELESLAG

SEQ ID NO: 17079 - protein, 18 aa, Artificial
  helical interface sequence
ELFQNLAKDLAMHIAMMN

SEQ ID NO: 17080 - protein, 6 aa, Artificial
  helical interface sequence
DRLRPL

SEQ ID NO: 17081 - protein, 12 aa, Artificial
  helical interface sequence
SREIQTAVRLLL

SEQ ID NO: 17082 - protein, 6 aa, Artificial
  helical interface sequence
FEKLKK

SEQ ID NO: 17083 - protein, 15 aa, Artificial
  helical interface sequence
YKAAVDLSHFLKEKG

SEQ ID NO: 17084 - protein, 10 aa, Artificial
  helical interface sequence
DGALEFALSQ

SEQ ID NO: 17085 - protein, 9 aa, Artificial
  helical interface sequence
NADCDAVYG

SEQ ID NO: 17086 - protein, 12 aa, Artificial
  helical interface sequence
NWFREQQRIQKM

SEQ ID NO: 17087 - protein, 25 aa, Artificial
  helical interface sequence
TRRYAACIRDLDYYLRYATYAMLAG

SEQ ID NO: 17088 - protein, 10 aa, Artificial
  helical interface sequence
QEEYAQMMID

SEQ ID NO: 17089 - protein, 6 aa, Artificial
  helical interface sequence
SVLDDR

SEQ ID NO: 17090 - protein, 6 aa, Artificial
  helical interface sequence
SEQLTS

SEQ ID NO: 17091 - protein, 15 aa, Artificial
  helical interface sequence
GHYVPELSQLVHRSK

SEQ ID NO: 17092 - protein, 20 aa, Artificial
  helical interface sequence
ENLYDDRVFRIKRALDLSMR

SEQ ID NO: 17093 - protein, 6 aa, Artificial
  helical interface sequence
YNRIRS

SEQ ID NO: 17094 - protein, 31 aa, Artificial; identical to SEQ ID NO: 1463
  helical interface sequence

SEQ ID NO: 17095 - protein, 10 aa, Artificial
  helical interface sequence
VQEVRRLLHR

SEQ ID NO: 17096 - protein, 10 aa, Artificial
  helical interface sequence
VQEVRRLLHR

SEQ ID NO: 17097 - protein, 6 aa, Artificial
  helical interface sequence
DEQLKS

SEQ ID NO: 17098 - protein, 7 aa, Artificial
  helical interface sequence
TEQLATG

SEQ ID NO: 17099 - protein, 8 aa, Artificial
  helical interface sequence
LEGLVLTH

SEQ ID NO: 17100 - protein, 5 aa, Artificial
  helical interface sequence
AYTRQ

SEQ ID NO: 17101 - protein, 6 aa, Artificial
  helical interface sequence
GEIDCK

SEQ ID NO: 17102 - protein, 14 aa, Artificial
  helical interface sequence
EMALAHMYEIAEKF

SEQ ID NO: 17103 - protein, 11 aa, Artificial
  helical interface sequence
AAELRHVMTNL

SEQ ID NO: 17104 - protein, 7 aa, Artificial
  helical interface sequence
DEQLKSG

SEQ ID NO: 17105 - protein, 16 aa, Artificial
  helical interface sequence
LRHFSMKVCEKVQRKG

SEQ ID NO: 17106 - protein, 6 aa, Artificial
  helical interface sequence
MMARKM

SEQ ID NO: 17107 - protein, 12 aa, Artificial
  helical interface sequence
PTIIKDHLKKAN

SEQ ID NO: 17108 - protein, 7 aa, Artificial
  helical interface sequence
SEQLTSG

SEQ ID NO: 17109 - protein, 12 aa, Artificial
  helical interface sequence
AFAKVVSQADAR

SEQ ID NO: 17110 - protein, 13 aa, Artificial
  helical interface sequence
GSQIDALSALVAD

SEQ ID NO: 17111 - protein, 6 aa, Artificial
  helical interface sequence
DEQLKS

SEQ ID NO: 17112 - protein, 7 aa, Artificial
  helical interface sequence
LLGEILN

SEQ ID NO: 17113 - protein, 14 aa, Artificial
  helical interface sequence
GGYTFCGLAALVIL

SEQ ID NO: 17114 - protein, 23 aa, Artificial
  helical interface sequence
VTSIEQAKVEEKIQEVFSSYKFN

SEQ ID NO: 17115 - protein, 18 aa, Artificial
  helical interface sequence
LERTRAELDTVCRHNYEK

SEQ ID NO: 17116 - protein, 14 aa, Artificial
  helical interface sequence
FHCWDYRRFVAAQA

SEQ ID NO: 17117 - protein, 9 aa, Artificial
  helical interface sequence
LKEAKDLVE

SEQ ID NO: 17118 - protein, 7 aa, Artificial
  helical interface sequence
RADIKEM

SEQ ID NO: 17119 - protein, 6 aa, Artificial
  helical interface sequence
DEQLKS

SEQ ID NO: 17120 - protein, 18 aa, Artificial
  helical interface sequence
KAEMENLRRRTELDIEKA

SEQ ID NO: 17121 - protein, 9 aa, Artificial
  helical interface sequence
DVAARLRAA

SEQ ID NO: 17122 - protein, 11 aa, Artificial
  helical interface sequence
KKWIQKVIDQF

SEQ ID NO: 17123 - protein, 13 aa, Artificial
  helical interface sequence
AARRFEELAAKAG

SEQ ID NO: 17124 - protein, 10 aa, Artificial
  helical interface sequence
PRDAQHFTQR

SEQ ID NO: 17125 - protein, 12 aa, Artificial
  helical interface sequence
KVEGTAVGFSFF

SEQ ID NO: 17126 - protein, 15 aa, Artificial
  helical interface sequence
IGTVIESVVRRAIEA

SEQ ID NO: 17127 - protein, 5 aa, Artificial
  helical interface sequence
ACHDV

SEQ ID NO: 17128 - protein, 5 aa, Artificial
  helical interface sequence
ACHDV

SEQ ID NO: 17129 - protein, 5 aa, Artificial
  helical interface sequence
ACHDV

SEQ ID NO: 17130 - protein, 10 aa, Artificial
  helical interface sequence
KENIIAAAQA

SEQ ID NO: 17131 - protein, 10 aa, Artificial
  helical interface sequence
PSVRKYAREK

SEQ ID NO: 17132 - protein, 14 aa, Artificial
  helical interface sequence
EELVKHIAMHVAAS

SEQ ID NO: 17133 - protein, 18 aa, Artificial
  helical interface sequence
EELLELVEMEVRELLSQY

SEQ ID NO: 17134 - protein, 10 aa, Artificial
  helical interface sequence
PLVSDVLRAL

SEQ ID NO: 17135 - protein, 5 aa, Artificial
  helical interface sequence
KTSVL

SEQ ID NO: 17136 - protein, 5 aa, Artificial
  helical interface sequence
VCEDG

SEQ ID NO: 17137 - protein, 11 aa, Artificial
  helical interface sequence
TVALREIRRYQ

SEQ ID NO: 17138 - protein, 7 aa, Artificial
  helical interface sequence
EELNKLL

SEQ ID NO: 17139 - protein, 6 aa, Artificial
  helical interface sequence
SEELET

SEQ ID NO: 17140 - protein, 7 aa, Artificial
  helical interface sequence
LMGEILN

SEQ ID NO: 17141 - protein, 6 aa, Artificial
  helical interface sequence
PGKFTE

SEQ ID NO: 17142 - protein, 15 aa, Artificial
  helical interface sequence
REKVEVQLPELFHKI

SEQ ID NO: 17143 - protein, 16 aa, Artificial
  helical interface sequence
HEAVVKEAGDACFGKY

SEQ ID NO: 17144 - protein, 14 aa, Artificial
  helical interface sequence
PVSIATAFAMLSLG

SEQ ID NO: 17145 - protein, 22 aa, Artificial
  helical interface sequence
PQGGLQNIAAEKHNLGILTKRS

SEQ ID NO: 17146 - protein, 31 aa, Artificial
  helical interface sequence
ALTNELIHLLGHSRHDWMNKLQLIKGNLSLQ

SEQ ID NO: 17147 - protein, 11 aa, Artificial
  helical interface sequence
AMDVVYALKRQ

SEQ ID NO: 17148 - protein, 7 aa, Artificial
  helical interface sequence
EELDSLI

SEQ ID NO: 17149 - protein, 12 aa, Artificial
  helical interface sequence
KGQLKEFLDANL

SEQ ID NO: 17150 - protein, 13 aa, Artificial
  helical interface sequence
QLQTELLAALLES

SEQ ID NO: 17151 - protein, 8 aa, Artificial
  helical interface sequence
LEEINRTF

SEQ ID NO: 17152 - protein, 15 aa, Artificial
  helical interface sequence
THLDAGALTTTFEEL

SEQ ID NO: 17153 - protein, 15 aa, Artificial
  helical interface sequence
THLDAGALTTTFEEL

SEQ ID NO: 17154 - protein, 15 aa, Artificial
  helical interface sequence
THLDAGALTTTFEEL

SEQ ID NO: 17155 - protein, 15 aa, Artificial
  helical interface sequence
THLDAGALTTTFEEL

SEQ ID NO: 17156 - protein, 15 aa, Artificial
  helical interface sequence
THLDAGALTTTFEEL

SEQ ID NO: 17157 - protein, 6 aa, Artificial
  helical interface sequence
SEQLTS

SEQ ID NO: 17158 - protein, 9 aa, Artificial
  helical interface sequence
QEQYELYCE

SEQ ID NO: 17159 - protein, 5 aa, Artificial
  helical interface sequence
SEQLT

SEQ ID NO: 17160 - protein, 7 aa, Artificial
  helical interface sequence
KEDARFI

SEQ ID NO: 17161 - protein, 24 aa, Artificial
  helical interface sequence
KGFEKIGNDIQILKSSINIAIEKL

SEQ ID NO: 17162 - protein, 10 aa, Artificial
  helical interface sequence
QVEYALESIS

SEQ ID NO: 17163 - protein, 22 aa, Artificial
  helical interface sequence
IPDARNAALRAKAEAAEFRYKY

SEQ ID NO: 17164 - protein, 20 aa, Artificial
  helical interface sequence
AADTQAIADIVQYHLELYTS

SEQ ID NO: 17165 - protein, 23 aa, Artificial
  helical interface sequence
AADTEAVTQLIGSNIELHSLYTS

SEQ ID NO: 17166 - protein, 9 aa, Artificial
  helical interface sequence
SLAAMAVLE

SEQ ID NO: 17167 - protein, 18 aa, Artificial
  helical interface sequence
PEDLFETISQALLNAADR

SEQ ID NO: 17168 - protein, 19 aa, Artificial
  helical interface sequence
VEDALYLGKRSILAAAHRD

SEQ ID NO: 17169 - protein, 5 aa, Artificial
  helical interface sequence
LESYL

SEQ ID NO: 17170 - protein, 36 aa, Artificial
  helical interface sequence
KKVLFSLGGSFLYYADRFKLYSAFCASHTKVPKVLV

SEQ ID NO: 17171 - protein, 15 aa, Artificial
  helical interface sequence
QIVATDVCQFLELCQ

SEQ ID NO: 17172 - protein, 10 aa, Artificial
  helical interface sequence
LKSLLQWVTS

SEQ ID NO: 17173 - protein, 5 aa, Artificial
  helical interface sequence
YKVSN

SEQ ID NO: 17174 - protein, 16 aa, Artificial
  helical interface sequence
KGLLDVTCKTVANMIK

SEQ ID NO: 17175 - protein, 21 aa, Artificial
  helical interface sequence
PVLQADFQKVVAGVANALAHR

SEQ ID NO: 17176 - protein, 14 aa, Artificial
  helical interface sequence
LKSALISLQALLQS

SEQ ID NO: 17177 - protein, 6 aa, Artificial
  helical interface sequence
EVDFRH

SEQ ID NO: 17178 - protein, 22 aa, Artificial
  helical interface sequence
AADTQAIADIVQYHLELYTSQY

SEQ ID NO: 17179 - protein, 23 aa, Artificial
  helical interface sequence
TADAEILINTARIHAQNYLKTYN

SEQ ID NO: 17180 - protein, 22 aa, Artificial
  helical interface sequence
TADARSMIEHARTAAVTHNLYY

SEQ ID NO: 17181 - protein, 6 aa, Artificial
  helical interface sequence
WDFAKD

SEQ ID NO: 17182 - protein, 22 aa, Artificial
  helical interface sequence
AADTEAVTQLIGSNIELHSLYT

SEQ ID NO: 17183 - protein, 22 aa, Artificial
  helical interface sequence
TADARSMIEHARTAAVTHNLYY

SEQ ID NO: 17184 - protein, 20 aa, Artificial
  helical interface sequence
ISDMQHIERLLKDLVTENAY

SEQ ID NO: 17185 - protein, 19 aa, Artificial
  helical interface sequence
VQVAEEAIVNAMRVLYYRD

SEQ ID NO: 17186 - protein, 7 aa, Artificial
  helical interface sequence
WEESNAY

SEQ ID NO: 17187 - protein, 9 aa, Artificial
  helical interface sequence
EKARKDRNK

SEQ ID NO: 17188 - protein, 15 aa, Artificial
  helical interface sequence
QQNMKDGLQNCKATY

SEQ ID NO: 17189 - protein, 16 aa, Artificial
  helical interface sequence
FDGFAIFARDMDMTLN

SEQ ID NO: 17190 - protein, 16 aa, Artificial
  helical interface sequence
LDWTDEFLMKVSEISG

SEQ ID NO: 17191 - protein, 16 aa, Artificial
  helical interface sequence
LDWTDEFLMKVSEISG

SEQ ID NO: 17192 - protein, 6 aa, Artificial
  helical interface sequence
ISEIEL

SEQ ID NO: 17193 - protein, 6 aa, Artificial
  helical interface sequence
CMAEVI

SEQ ID NO: 17194 - protein, 9 aa, Artificial
  helical interface sequence
NELASAAAR

SEQ ID NO: 17195 - protein, 13 aa, Artificial
  helical interface sequence
CEDRIFYNILEIE

SEQ ID NO: 17196 - protein, 8 aa, Artificial
  helical interface sequence
IDEINRTF

SEQ ID NO: 17197 - protein, 25 aa, Artificial
  helical interface sequence
SRRMAACLRDMEIILRYVTYAVFAG

SEQ ID NO: 17198 - protein, 25 aa, Artificial
  helical interface sequence
SRRMAACLRDMEIILRYVTYAVFAG

SEQ ID NO: 17199 - protein, 8 aa, Artificial
  helical interface sequence
IDEINRTF

SEQ ID NO: 17200 - protein, 10 aa, Artificial
  helical interface sequence
TGPMDEYLIA

SEQ ID NO: 17201 - protein, 8 aa, Artificial
  helical interface sequence
IDEINRTF

SEQ ID NO: 17202 - protein, 8 aa, Artificial
  helical interface sequence
REQVEAAV

SEQ ID NO: 17203 - protein, 19 aa, Artificial
  helical interface sequence
DDKMAQDTYTFLVKWFERF

SEQ ID NO: 17204 - protein, 16 aa, Artificial
  helical interface sequence
EGQMAAIIAKYRPRLE

SEQ ID NO: 17205 - protein, 16 aa, Artificial
  helical interface sequence
LAATDELLMTVSQLSG

SEQ ID NO: 17206 - protein, 9 aa, Artificial
  helical interface sequence
YAAFSSALY

SEQ ID NO: 17207 - protein, 16 aa, Artificial
  helical interface sequence
YDDIGPKALSRCLIVY

SEQ ID NO: 17208 - protein, 19 aa, Artificial
  helical interface sequence
PANFKILNHCILVVISTMF

SEQ ID NO: 17209 - protein, 26 aa, Artificial
  helical interface sequence
KLRRYTTFSKRKTGIMKKAYELSTLT

SEQ ID NO: 17210 - protein, 9 aa, Artificial
  helical interface sequence
DRLRPLSYP

SEQ ID NO: 17211 - protein, 9 aa, Artificial
  helical interface sequence
DRLRPLSYP

SEQ ID NO: 17212 - protein, 18 aa, Artificial
  helical interface sequence
VNDIQKLVGKLNWASQIY

SEQ ID NO: 17213 - protein, 6 aa, Artificial
  helical interface sequence
PWTQRF

SEQ ID NO: 17214 - protein, 12 aa, Artificial
  helical interface sequence
PETDIVGNLWMK

SEQ ID NO: 17215 - protein, 20 aa, Artificial
  helical interface sequence
MELLTKTLGWDIQEELNKLT

SEQ ID NO: 17216 - protein, 5 aa, Artificial
  helical interface sequence
QEKFG

SEQ ID NO: 17217 - protein, 5 aa, Artificial
  helical interface sequence
FFVLG

SEQ ID NO: 17218 - protein, 6 aa, Artificial
  helical interface sequence
KAADSD

SEQ ID NO: 17219 - protein, 15 aa, Artificial
  helical interface sequence
WPLIKATVGLIRNLA

SEQ ID NO: 17220 - protein, 9 aa, Artificial
  helical interface sequence
DVVYALKRQ

SEQ ID NO: 17221 - protein, 7 aa, Artificial
  helical interface sequence
SEQLTSG

SEQ ID NO: 17222 - protein, 6 aa, Artificial
  helical interface sequence
SEELET

SEQ ID NO: 17223 - protein, 14 aa, Artificial
  helical interface sequence
FPEFLTMMARKMKD

SEQ ID NO: 17224 - protein, 14 aa, Artificial
  helical interface sequence
AKNYGRAVYECLRG

SEQ ID NO: 17225 - protein, 10 aa, Artificial
  helical interface sequence
PELAAACEVW

SEQ ID NO: 17226 - protein, 10 aa, Artificial
  helical interface sequence
PELAAACEVW

SEQ ID NO: 17227 - protein, 10 aa, Artificial
  helical interface sequence
PELAAACEVW

SEQ ID NO: 17228 - protein, 14 aa, Artificial
  helical interface sequence
AKNYGRAVYECLRG

SEQ ID NO: 17229 - protein, 21 aa, Artificial
  helical interface sequence
NAPGAAANRVALEACTQARNE

SEQ ID NO: 17230 - protein, 10 aa, Artificial
  helical interface sequence
PELAAACEVW

SEQ ID NO: 17231 - protein, 10 aa, Artificial
  helical interface sequence
PELAAACEVW

SEQ ID NO: 17232 - protein, 10 aa, Artificial
  helical interface sequence
PELAAACEVW

SEQ ID NO: 17233 - protein, 10 aa, Artificial
  helical interface sequence
PELAAACEVW

SEQ ID NO: 17234 - protein, 14 aa, Artificial
  helical interface sequence
DEQIAAQVDYIVAN

SEQ ID NO: 17235 - protein, 23 aa, Artificial
  helical interface sequence
GPDYRVLVHRARKLAQQYYLVYQ

SEQ ID NO: 17236 - protein, 22 aa, Artificial
  helical interface sequence
AGDTVQFAEYIQKNVQLYKMRN

SEQ ID NO: 17237 - protein, 23 aa, Artificial
  helical interface sequence
GPDYRVLVHRARKLAQQYYLVYQ

SEQ ID NO: 17238 - protein, 18 aa, Artificial
  helical interface sequence
PRAIHSWLTRAMYSRRSK

SEQ ID NO: 17239 - protein, 23 aa, Artificial
  helical interface sequence
AADTQAVADAVTYQLGFHSIELN

SEQ ID NO: 17240 - protein, 18 aa, Artificial
  helical interface sequence
EEEAKNLVSEAIAAGIFN

SEQ ID NO: 17241 - protein, 16 aa, Artificial
  helical interface sequence
VGIVAAQSIGEPGTQL

SEQ ID NO: 17242 - protein, 5 aa, Artificial
  helical interface sequence
AEKHG

SEQ ID NO: 17243 - protein, 11 aa, Artificial
  helical interface sequence
AETWAMKELLT

SEQ ID NO: 17244 - protein, 14 aa, Artificial
  helical interface sequence
DEQIKKQIDYMISK

SEQ ID NO: 17245 - protein, 21 aa, Artificial
  helical interface sequence
IQAGATANRVALEAMILARNE

SEQ ID NO: 17246 - protein, 18 aa, Artificial
  helical interface sequence
PERVLLQLKYRYDVEIDN

SEQ ID NO: 17247 - protein, 6 aa, Artificial
  helical interface sequence
LQAAVG

SEQ ID NO: 17248 - protein, 12 aa, Artificial
  helical interface sequence
TKELGKVMRMLG

SEQ ID NO: 17249 - protein, 22 aa, Artificial
  helical interface sequence
QTEREKKKKILAERRKVLAIDH

SEQ ID NO: 17250 - protein, 8 aa, Artificial
  helical interface sequence
YDEFLEFM

SEQ ID NO: 17251 - protein, 32 aa, Artificial
  helical interface sequence
KEAIISHLSWVSLFLGFHTLGLYVHNDVVVAF

SEQ ID NO: 17252 - protein, 29 aa, Artificial
  helical interface sequence
DFLIPSVLFLYIAGWIGWVGRAYLIAVRN

SEQ ID NO: 17253 - protein, 10 aa, Artificial
  helical interface sequence
RTFSERTLAF

SEQ ID NO: 17254 - protein, 21 aa, Artificial
  helical interface sequence
IPDGRHLVNRGREEAASFKKL

SEQ ID NO: 17255 - protein, 18 aa, Artificial
  helical interface sequence
PSYIFEYLATVMYQRRSK

SEQ ID NO: 17256 - protein, 18 aa, Artificial
  helical interface sequence
CDVLAKRMANLSQIYTQR

SEQ ID NO: 17257 - protein, 5 aa, Artificial
  helical interface sequence
PGMLN

SEQ ID NO: 17258 - protein, 12 aa, Artificial
  helical interface sequence
MQSVVKLLDDQL

SEQ ID NO: 17259 - protein, 5 aa, Artificial
  helical interface sequence
MMSTY

SEQ ID NO: 17260 - protein, 6 aa, Artificial
  helical interface sequence
SEELET

SEQ ID NO: 17261 - protein, 7 aa, Artificial
  helical interface sequence
SEQLTSG

SEQ ID NO: 17262 - protein, 23 aa, Artificial
  helical interface sequence
SSGSFTEGRIAAKAAVRFILEQK

SEQ ID NO: 17263 - protein, 12 aa, Artificial
  helical interface sequence
ATDFLIPLCNAL

SEQ ID NO: 17264 - protein, 6 aa, Artificial
  helical interface sequence
DEQLKS

SEQ ID NO: 17265 - protein, 28 aa, Artificial
  helical interface sequence
GCKLQDTLVRQERPIRKSIEDLRNTVDS

SEQ ID NO: 17266 - protein, 19 aa, Artificial
  helical interface sequence
PAVHASLDKFLASVSTVLT

SEQ ID NO: 17267 - protein, 19 aa, Artificial
  helical interface sequence
PAVHASLDKFLASVSTVLT

SEQ ID NO: 17268 - protein, 19 aa, Artificial
  helical interface sequence
PENFRLLGNVLVCVLAHHF

SEQ ID NO: 17269 - protein, 22 aa, Artificial
  helical interface sequence
LLEEDKICGYVAGGLMYAAPKR

SEQ ID NO: 17270 - protein, 10 aa, Artificial
  helical interface sequence
ESLIHRLQNG

SEQ ID NO: 17271 - protein, 6 aa, Artificial
  helical interface sequence
SEQLTS

SEQ ID NO: 17272 - protein, 5 aa, Artificial
  helical interface sequence
HTVAA

SEQ ID NO: 17273 - protein, 16 aa, Artificial
  helical interface sequence
WAKIRDEMGLAMEEGC

SEQ ID NO: 17274 - protein, 6 aa, Artificial
  helical interface sequence
RSVFAN

SEQ ID NO: 17275 - protein, 6 aa, Artificial
  helical interface sequence
SEQLTS

SEQ ID NO: 17276 - protein, 21 aa, Artificial
  helical interface sequence
PAAAIQQGKVESSKDFLIATL

SEQ ID NO: 17277 - protein, 22 aa, Artificial
  helical interface sequence
AQGALANIAVDKANLEIMTKRS

SEQ ID NO: 17278 - protein, 16 aa, Artificial
  helical interface sequence
NVFAWALDVLAKRLRS

SEQ ID NO: 17279 - protein, 18 aa, Artificial
  helical interface sequence
QCTSVETVTELTEFAKAI

SEQ ID NO: 17280 - protein, 9 aa, Artificial
  helical interface sequence
VAGKAVMKA

SEQ ID NO: 17281 - protein, 7 aa, Artificial
  helical interface sequence
EELNKLL

SEQ ID NO: 17282 - protein, 9 aa, Artificial
  helical interface sequence
QAVLSLYAS

SEQ ID NO: 17283 - protein, 11 aa, Artificial
  helical interface sequence
IHETTYNSIMK

SEQ ID NO: 17284 - protein, 15 aa, Artificial
  helical interface sequence
QMSHWGATVITNLFS

SEQ ID NO: 17285 - protein, 15 aa, Artificial
  helical interface sequence
QMSHWGATVITNLFS

SEQ ID NO: 17286 - protein, 21 aa, Artificial
  helical interface sequence
EDESYARAYRIIRAHQTELTH

SEQ ID NO: 17287 - protein, 11 aa, Artificial
  helical interface sequence
LHDQVHLLECA

SEQ ID NO: 17288 - protein, 29 aa, Artificial
  helical interface sequence
IGNLRNMAIDMGNEIGSQNRQVDRIQQKA

SEQ ID NO: 17289 - protein, 6 aa, Artificial
  helical interface sequence
SEQLTS

SEQ ID NO: 17290 - protein, 13 aa, Artificial
  helical interface sequence
IWTHLDWVSNTGY

SEQ ID NO: 17291 - protein, 7 aa, Artificial
  helical interface sequence
ELEQIAD

SEQ ID NO: 17292 - protein, 13 aa, Artificial
  helical interface sequence
IWTHLDWVSNTGY

SEQ ID NO: 17293 - protein, 14 aa, Artificial
  helical interface sequence
GNKRLDAVNYIVSN

SEQ ID NO: 17294 - protein, 14 aa, Artificial
  helical interface sequence
GDVLYELLQHILKQ

SEQ ID NO: 17295 - protein, 14 aa, Artificial
  helical interface sequence
GDVLYELLQHILKQ

SEQ ID NO: 17296 - protein, 9 aa, Artificial
  helical interface sequence
QAVLSLYAS

SEQ ID NO: 17297 - protein, 7 aa, Artificial
  helical interface sequence
KAEIANK

SEQ ID NO: 17298 - protein, 9 aa, Artificial
  helical interface sequence
PEEVEEVIG

SEQ ID NO: 17299 - protein, 5 aa, Artificial
  helical interface sequence
PAELS

SEQ ID NO: 17300 - protein, 20 aa, Artificial
  helical interface sequence
DSQKKAIERMKDTLRITYLT

SEQ ID NO: 17301 - protein, 12 aa, Artificial
  helical interface sequence
AAELRHVMTNLG

SEQ ID NO: 17302 - protein, 13 aa, Artificial
  helical interface sequence
RIIHLQRRINMQL

SEQ ID NO: 17303 - protein, 46 aa, Artificial; identical to SEQ ID NO: 1500
  helical interface sequence

SEQ ID NO: 17304 - protein, 6 aa, Artificial
  helical interface sequence
EKDIVF

SEQ ID NO: 17305 - protein, 6 aa, Artificial
  helical interface sequence
CPIGLI

SEQ ID NO: 17306 - protein, 13 aa, Artificial
  helical interface sequence
KRWKKAVDAILAA

SEQ ID NO: 17307 - protein, 10 aa, Artificial
  helical interface sequence
KEQKLRFAFR

SEQ ID NO: 17308 - protein, 8 aa, Artificial
  helical interface sequence
EAFVKHIM

SEQ ID NO: 17309 - protein, 14 aa, Artificial
  helical interface sequence
PPSISSVLTILYYG

SEQ ID NO: 17310 - protein, 10 aa, Artificial
  helical interface sequence
DTNFKKWSDS

SEQ ID NO: 17311 - protein, 9 aa, Artificial
  helical interface sequence
QAVLSLYAS

SEQ ID NO: 17312 - protein, 8 aa, Artificial
  helical interface sequence
LSEVIAEG

SEQ ID NO: 17313 - protein, 13 aa, Artificial
  helical interface sequence
DAWEMDRVLEKIG

SEQ ID NO: 17314 - protein, 36 aa, Artificial
  helical interface sequence
AWTIVARNVGLMILTGAAAHCEHGNHIAHALVEMAE

SEQ ID NO: 17315 - protein, 36 aa, Artificial; identical to SEQ ID NO: 17314
  helical interface sequence

SEQ ID NO: 17316 - protein, 13 aa, Artificial
  helical interface sequence
DTRDAWVNKIAHV

SEQ ID NO: 17317 - protein, 10 aa, Artificial
  helical interface sequence
DFKEAFLLFD

SEQ ID NO: 17318 - protein, 10 aa, Artificial
  helical interface sequence
EAERLRAYLE

SEQ ID NO: 17319 - protein, 12 aa, Artificial
  helical interface sequence
QEVVDKVMETLD

SEQ ID NO: 17320 - protein, 5 aa, Artificial
  helical interface sequence
DEQLK

SEQ ID NO: 17321 - protein, 10 aa, Artificial
  helical interface sequence
DAEVDELLKG

SEQ ID NO: 17322 - protein, 17 aa, Artificial
  helical interface sequence
PYLIAFLVDIYEDMLEN

SEQ ID NO: 17323 - protein, 15 aa, Artificial
  helical interface sequence
RLTIAFFALSGLDML

SEQ ID NO: 17324 - protein, 15 aa, Artificial
  helical interface sequence
DVMYTTLLIELCKLQ

SEQ ID NO: 17325 - protein, 12 aa, Artificial
  helical interface sequence
PSQAFEYIRYNK

SEQ ID NO: 17326 - protein, 12 aa, Artificial
  helical interface sequence
FNSLNLKLSQKY

SEQ ID NO: 17327 - protein, 19 aa, Artificial
  helical interface sequence
EDDSKLASRKYARIIQKIG

SEQ ID NO: 17328 - protein, 9 aa, Artificial
  helical interface sequence
VGAEICARI

SEQ ID NO: 17329 - protein, 11 aa, Artificial
  helical interface sequence
EETRAELSQLC

SEQ ID NO: 17330 - protein, 10 aa, Artificial
  helical interface sequence
EIIQNAQRDA

SEQ ID NO: 17331 - protein, 11 aa, Artificial
  helical interface sequence
DEFIAHRLGLI

SEQ ID NO: 17332 - protein, 11 aa, Artificial
  helical interface sequence
WESYLNLLQED

SEQ ID NO: 17333 - protein, 6 aa, Artificial
  helical interface sequence
SEELET

SEQ ID NO: 17334 - protein, 6 aa, Artificial
  helical interface sequence
SEELQA

SEQ ID NO: 17335 - protein, 20 aa, Artificial
  helical interface sequence
DSQIEKERDVILQELQENDT

SEQ ID NO: 17336 - protein, 15 aa, Artificial
  helical interface sequence
TTTAFSSVTHICRDV

SEQ ID NO: 17337 - protein, 9 aa, Artificial
  helical interface sequence
YRHLVGVCY

SEQ ID NO: 17338 - protein, 34 aa, Artificial; identical to SEQ ID NO: 2403
  helical interface sequence

SEQ ID NO: 17339 - protein, 16 aa, Artificial
  helical interface sequence
THLQVMAKERFHAGWM

SEQ ID NO: 17340 - protein, 10 aa, Artificial
  helical interface sequence
DFKEAFLLFD

SEQ ID NO: 17341 - protein, 21 aa, Artificial
  helical interface sequence
GEWSYHRDYRETQITKLLKKN

SEQ ID NO: 17342 - protein, 16 aa, Artificial
  helical interface sequence
EWDDFSLEEAMKIKES

SEQ ID NO: 17343 - protein, 16 aa, Artificial
  helical interface sequence
AIVVGRILTEVIKKEA

SEQ ID NO: 17344 - protein, 27 aa, Artificial
  helical interface sequence
FYIVYTIIPCILISILAILVFYLPPDA

SEQ ID NO: 17345 - protein, 6 aa, Artificial
  helical interface sequence
VENFLC

SEQ ID NO: 17346 - protein, 11 aa, Artificial
  helical interface sequence
ISAFSCIAALA

SEQ ID NO: 17347 - protein, 11 aa, Artificial
  helical interface sequence
AIIDKLFLDTL

SEQ ID NO: 17348 - protein, 14 aa, Artificial
  helical interface sequence
LHLPAVILKTFLRE

SEQ ID NO: 17349 - protein, 19 aa, Artificial
  helical interface sequence
KVYENVTGLVKAVIEMSSK

SEQ ID NO: 17350 - protein, 28 aa, Artificial
  helical interface sequence
HREIEMAQKLLNSDLGELINKMKLAQQY

SEQ ID NO: 17351 - protein, 12 aa, Artificial
  helical interface sequence
GLLSTKMIRRDL

SEQ ID NO: 17352 - protein, 9 aa, Artificial
  helical interface sequence
AAILKKVIQ

SEQ ID NO: 17353 - protein, 14 aa, Artificial
  helical interface sequence
NPILWRARQYINSG

SEQ ID NO: 17354 - protein, 6 aa, Artificial
  helical interface sequence
SEELKT

SEQ ID NO: 17355 - protein, 6 aa, Artificial
  helical interface sequence
MMELAE

SEQ ID NO: 17356 - protein, 23 aa, Artificial
  helical interface sequence
VADARVLVDFARISAQQEKVTYG

SEQ ID NO: 17357 - protein, 10 aa, Artificial
  helical interface sequence
RRFRKWFEAG

SEQ ID NO: 17358 - protein, 28 aa, Artificial
  helical interface sequence
GFWQAITVCALGAFISWMLREVEISRKL

SEQ ID NO: 17359 - protein, 7 aa, Artificial
  helical interface sequence
EIEQITD

SEQ ID NO: 17360 - protein, 16 aa, Artificial
  helical interface sequence
HTAWAFLSAIWLWMVL

SEQ ID NO: 17361 - protein, 13 aa, Artificial
  helical interface sequence
PMEVMLRAVFMQQ

SEQ ID NO: 17362 - protein, 12 aa, Artificial
  helical interface sequence
PMEVMLRAVFMQ

SEQ ID NO: 17363 - protein, 12 aa, Artificial
  helical interface sequence
PMEVMLRAVFMQ

SEQ ID NO: 17364 - protein, 15 aa, Artificial
  helical interface sequence
VQSLLDEEQEQMFAS

SEQ ID NO: 17365 - protein, 18 aa, Artificial
  helical interface sequence
WITQATGVWFAKKFTEDY

SEQ ID NO: 17366 - protein, 7 aa, Artificial
  helical interface sequence
SEQLTSG

SEQ ID NO: 17367 - protein, 21 aa, Artificial
  helical interface sequence
IADVCESMKEQLLVLVEWAKY

SEQ ID NO: 17368 - protein, 14 aa, Artificial
  helical interface sequence
KRLMKMWREAKALH

SEQ ID NO: 17369 - protein, 18 aa, Artificial
  helical interface sequence
RSQIIRIAREFADNADKT

SEQ ID NO: 17370 - protein, 5 aa, Artificial
  helical interface sequence
STCLY

SEQ ID NO: 17371 - protein, 5 aa, Artificial
  helical interface sequence
IDDYY

SEQ ID NO: 17372 - protein, 5 aa, Artificial
  helical interface sequence
SEELQ

SEQ ID NO: 17373 - protein, 14 aa, Artificial
  helical interface sequence
FDGKANRLASMVRG

SEQ ID NO: 17374 - protein, 23 aa, Artificial
  helical interface sequence
AGIAIELVRLFAVELEHYEKIEG

SEQ ID NO: 17375 - protein, 7 aa, Artificial
  helical interface sequence
FTDYLRG

SEQ ID NO: 17376 - protein, 19 aa, Artificial
  helical interface sequence
GRSLANAYAQTLGTIFTEQ

SEQ ID NO: 17377 - protein, 5 aa, Artificial
  helical interface sequence
MELFV

SEQ ID NO: 17378 - protein, 5 aa, Artificial
  helical interface sequence
MELFV

SEQ ID NO: 17379 - protein, 22 aa, Artificial
  helical interface sequence
PIATILFLLGTLVAVWLGIGST

SEQ ID NO: 17380 - protein, 7 aa, Artificial
  helical interface sequence
KIQLTSG

SEQ ID NO: 17381 - protein, 28 aa, Artificial
  helical interface sequence
PVVRIGLQYGFILFIMSEVMFFVAWFWA

SEQ ID NO: 17382 - protein, 7 aa, Artificial
  helical interface sequence
TDDLSNF

SEQ ID NO: 17383 - protein, 7 aa, Artificial
  helical interface sequence
TDDLSNF

SEQ ID NO: 17384 - protein, 6 aa, Artificial
  helical interface sequence
RFAALL

SEQ ID NO: 17385 - protein, 18 aa, Artificial
  helical interface sequence
RSQIIRIAREFADNADKT

SEQ ID NO: 17386 - protein, 10 aa, Artificial
  helical interface sequence
YPRALWWSVE

SEQ ID NO: 17387 - protein, 12 aa, Artificial
  helical interface sequence
TKTMAKVITTVL

SEQ ID NO: 17388 - protein, 5 aa, Artificial
  helical interface sequence
DRQLR

SEQ ID NO: 17389 - protein, 7 aa, Artificial
  helical interface sequence
QFLYTTG

SEQ ID NO: 17390 - protein, 17 aa, Artificial
  helical interface sequence
QELELSLNMAFARAREH

SEQ ID NO: 17391 - protein, 11 aa, Artificial
  helical interface sequence
MEFVIDVLQKF

SEQ ID NO: 17392 - protein, 19 aa, Artificial
  helical interface sequence
AQKIDRMMEAFAQRYCLCN

SEQ ID NO: 17393 - protein, 15 aa, Artificial
  helical interface sequence
CEDMMKRAVFARELG

SEQ ID NO: 17394 - protein, 15 aa, Artificial
  helical interface sequence
CEDMMKRAVFARELG

SEQ ID NO: 17395 - protein, 9 aa, Artificial
  helical interface sequence
QAVLSLYAS

SEQ ID NO: 17396 - protein, 18 aa, Artificial
  helical interface sequence
QDESGAAAIFTVQLDDYL

SEQ ID NO: 17397 - protein, 8 aa, Artificial
  helical interface sequence
RDEIKAAL

SEQ ID NO: 17398 - protein, 9 aa, Artificial
  helical interface sequence
KLQAAFHEK

SEQ ID NO: 17399 - protein, 13 aa, Artificial
  helical interface sequence
DEKVVKGLIEFFT

SEQ ID NO: 17400 - protein, 22 aa, Artificial
  helical interface sequence
QKSTQNAINGITNKVNSVIEKM

SEQ ID NO: 17401 - protein, 50 aa, Artificial; identical to SEQ ID NO: 605
  helical interface sequence

SEQ ID NO: 17402 - protein, 10 aa, Artificial
  helical interface sequence
YEELREQLSS

SEQ ID NO: 17403 - protein, 7 aa, Artificial
  helical interface sequence
KVKSQLK

SEQ ID NO: 17404 - protein, 8 aa, Artificial
  helical interface sequence
FQEVWGRS

SEQ ID NO: 17405 - protein, 22 aa, Artificial
  helical interface sequence
AADTQAIADIVQYHLELYTSQY

SEQ ID NO: 17406 - protein, 20 aa, Artificial
  helical interface sequence
ISDMQHIERLLKDLVTENAY

SEQ ID NO: 17407 - protein, 19 aa, Artificial
  helical interface sequence
VQVAEEAIVNAMRVLYYRD

SEQ ID NO: 17408 - protein, 18 aa, Artificial
  helical interface sequence
VEEVIKLVRDSFTSATER

SEQ ID NO: 17409 - protein, 22 aa, Artificial
  helical interface sequence
AADGDALVKRFKNSVKWYHFDH

SEQ ID NO: 17410 - protein, 22 aa, Artificial
  helical interface sequence
APDARVLSNYLRQQCNYSSLVF

SEQ ID NO: 17411 - protein, 19 aa, Artificial
  helical interface sequence
VEDALYLGKRSILAAAHRD

SEQ ID NO: 17412 - protein, 13 aa, Artificial
  helical interface sequence
ASLIMPFLDNQVN

SEQ ID NO: 17413 - protein, 20 aa, Artificial
  helical interface sequence
DEQKRALSAGLLRVISEATG

SEQ ID NO: 17414 - protein, 20 aa, Artificial
  helical interface sequence
DEQKRALSAGLLRVISEATG

SEQ ID NO: 17415 - protein, 21 aa, Artificial
  helical interface sequence
NINTERTLKTQAVNKLAEIMN

SEQ ID NO: 17416 - protein, 29 aa, Artificial
  helical interface sequence
CDEKTQSLGVKFLDEYQSKVKRQIFSGYQ

SEQ ID NO: 17417 - protein, 14 aa, Artificial
  helical interface sequence
SRSLHFFLAAWPVV

SEQ ID NO: 17418 - protein, 16 aa, Artificial
  helical interface sequence
VAAIFRFLLFFQGFHN

SEQ ID NO: 17419 - protein, 5 aa, Artificial
  helical interface sequence
DEQLK

SEQ ID NO: 17420 - protein, 16 aa, Artificial
  helical interface sequence
VKIIKSVETAAAARLC

SEQ ID NO: 17421 - protein, 9 aa, Artificial
  helical interface sequence
KLQAAFHEK

SEQ ID NO: 17422 - protein, 13 aa, Artificial
  helical interface sequence
YSWIINGIEWAIA

SEQ ID NO: 17423 - protein, 10 aa, Artificial
  helical interface sequence
HGTHVAGTVA

SEQ ID NO: 17424 - protein, 13 aa, Artificial
  helical interface sequence
TALKTVVDKAVSS

SEQ ID NO: 17425 - protein, 16 aa, Artificial
  helical interface sequence
MEGTGLMLMANLFKTS

SEQ ID NO: 17426 - protein, 19 aa, Artificial
  helical interface sequence
DQLADESLESTRRMLQLVE

SEQ ID NO: 17427 - protein, 18 aa, Artificial
  helical interface sequence
QVAVGRQLEDFRSKRLMG

SEQ ID NO: 17428 - protein, 9 aa, Artificial
  helical interface sequence
AEDMLTCCG

SEQ ID NO: 17429 - protein, 21 aa, Artificial
  helical interface sequence
DSQIEKERDVILQELQENDTS

SEQ ID NO: 17430 - protein, 22 aa, Artificial
  helical interface sequence
PLSQCLFWALVADLLTLTWIGG

SEQ ID NO: 17431 - protein, 20 aa, Artificial
  helical interface sequence
VPTAQLWGAVGAVGLVWATD

SEQ ID NO: 17432 - protein, 23 aa, Artificial
  helical interface sequence
PLSQCLFWALVADLLTLTWIGGQ

SEQ ID NO: 17433 - protein, 17 aa, Artificial
  helical interface sequence
GDVLHNVLQMLIIESHS

SEQ ID NO: 17434 - protein, 8 aa, Artificial
  helical interface sequence
LDMYLCRV

SEQ ID NO: 17435 - protein, 15 aa, Artificial
  helical interface sequence
LEDSIQILRTDLWKK

SEQ ID NO: 17436 - protein, 13 aa, Artificial
  helical interface sequence
SEEEIREAFRVFD

SEQ ID NO: 17437 - protein, 11 aa, Artificial
  helical interface sequence
MDQVAEKCAYH

SEQ ID NO: 17438 - protein, 13 aa, Artificial
  helical interface sequence
SAAPVGRFTAHWR

SEQ ID NO: 17439 - protein, 21 aa, Artificial
  helical interface sequence
LEDACEHLADYLEAYWKATHP

SEQ ID NO: 17440 - protein, 9 aa, Artificial
  helical interface sequence
ALQDSFRRH

SEQ ID NO: 17441 - protein, 9 aa, Artificial
  helical interface sequence
RAIAEDAAQ

SEQ ID NO: 17442 - protein, 7 aa, Artificial
  helical interface sequence
QAVRNRG

SEQ ID NO: 17443 - protein, 10 aa, Artificial
  helical interface sequence
HGTHCAGIAA

SEQ ID NO: 17444 - protein, 6 aa, Artificial
  helical interface sequence
SEQLTS

SEQ ID NO: 17445 - protein, 26 aa, Artificial
  helical interface sequence
DIKALTTLCDLADRELVVIIGWAKHI

SEQ ID NO: 17446 - protein, 32 aa, Artificial; identical to SEQ ID NO: 3013
  helical interface sequence

SEQ ID NO: 17447 - protein, 32 aa, Artificial; identical to SEQ ID NO: 3013
  helical interface sequence

SEQ ID NO: 17448 - protein, 19 aa, Artificial
  helical interface sequence
DNVMTAEMRKIAMAAVLSG

SEQ ID NO: 17449 - protein, 8 aa, Artificial
  helical interface sequence
EVECQVAC

SEQ ID NO: 17450 - protein, 10 aa, Artificial
  helical interface sequence
VNLYQNYSEL

SEQ ID NO: 17451 - protein, 16 aa, Artificial
  helical interface sequence
IHEGLKLANEQIQKAG

SEQ ID NO: 17452 - protein, 16 aa, Artificial
  helical interface sequence
IHEGLKLANEQIQKAG

SEQ ID NO: 17453 - protein, 12 aa, Artificial
  helical interface sequence
VGRMLRYIKKGH

SEQ ID NO: 17454 - protein, 12 aa, Artificial
  helical interface sequence
EIYSLALVTWRD

SEQ ID NO: 17455 - protein, 14 aa, Artificial
  helical interface sequence
TRLISGVVQSYVEL

SEQ ID NO: 17456 - protein, 7 aa, Artificial
  helical interface sequence
LAELVND

SEQ ID NO: 17457 - protein, 7 aa, Artificial
  helical interface sequence
DFITTYI

SEQ ID NO: 17458 - protein, 27 aa, Artificial
  helical interface sequence
AKPLIRSELLPKLRQIFQQFGKDLLAT

SEQ ID NO: 17459 - protein, 7 aa, Artificial
  helical interface sequence
IGPILHS

SEQ ID NO: 17460 - protein, 28 aa, Artificial
  helical interface sequence
KEVLEGTRAELDTVCRHNYEVAFRGILQ

SEQ ID NO: 17461 - protein, 20 aa, Artificial
  helical interface sequence
LEESIRQVQDLEREFLIKLG

SEQ ID NO: 17462 - protein, 12 aa, Artificial
  helical interface sequence
QEDIILFRDRFD

SEQ ID NO: 17463 - protein, 6 aa, Artificial
  helical interface sequence
SEQLTS

SEQ ID NO: 17464 - protein, 6 aa, Artificial
  helical interface sequence
SEQLTS

SEQ ID NO: 17465 - protein, 12 aa, Artificial
  helical interface sequence
GGDVIRSACKWS

SEQ ID NO: 17466 - protein, 12 aa, Artificial
  helical interface sequence
GGDVIRSACKWS

SEQ ID NO: 17467 - protein, 9 aa, Artificial
  helical interface sequence
DEFRIGIEK

SEQ ID NO: 17468 - protein, 16 aa, Artificial
  helical interface sequence
ADAIGADALGRMLAVY

SEQ ID NO: 17469 - protein, 19 aa, Artificial
  helical interface sequence
PSNFKILSHCILVVVAKMF

SEQ ID NO: 17470 - protein, 30 aa, Artificial; identical to SEQ ID NO: 4094
  helical interface sequence

SEQ ID NO: 17471 - protein, 11 aa, Artificial
  helical interface sequence
LEREVMLAARK

SEQ ID NO: 17472 - protein, 15 aa, Artificial
  helical interface sequence
FAVAEKRKKAYADFY

SEQ ID NO: 17473 - protein, 25 aa, Artificial
  helical interface sequence
LLARRLRFHIVGAFMVSLGFATFYK

SEQ ID NO: 17474 - protein, 6 aa, Artificial
  helical interface sequence
LVEICQ

SEQ ID NO: 17475 - protein, 25 aa, Artificial
  helical interface sequence
PNRVKWMIAFICLVMLAQLMLILKK

SEQ ID NO: 17476 - protein, 21 aa, Artificial
  helical interface sequence
WVALLVVFTWSIAMVVWGRNG

SEQ ID NO: 17477 - protein, 24 aa, Artificial
  helical interface sequence
VLGWVALLVVFTWSIAMVVWGRNG

SEQ ID NO: 17478 - protein, 6 aa, Artificial
  helical interface sequence
DEQLKS

SEQ ID NO: 17479 - protein, 21 aa, Artificial
  helical interface sequence
KQYRHLLLEDQRIRGLLEKEL

SEQ ID NO: 17480 - protein, 15 aa, Artificial
  helical interface sequence
QLAELQWQRQQEWRN

SEQ ID NO: 17481 - protein, 5 aa, Artificial
  helical interface sequence
GALIK

SEQ ID NO: 17482 - protein, 10 aa, Artificial
  helical interface sequence
RTFSERTLAF

SEQ ID NO: 17483 - protein, 5 aa, Artificial
  helical interface sequence
PKMRN

SEQ ID NO: 17484 - protein, 12 aa, Artificial
  helical interface sequence
LKKLVYLYLMNY

SEQ ID NO: 17485 - protein, 12 aa, Artificial
  helical interface sequence
LKKLVYLYLMNY

SEQ ID NO: 17486 - protein, 12 aa, Artificial
  helical interface sequence
LKKLVYLYLMNY

SEQ ID NO: 17487 - protein, 17 aa, Artificial
  helical interface sequence
YVVQEAIVVIKDIFRKY

SEQ ID NO: 17488 - protein, 12 aa, Artificial
  helical interface sequence
LKKLVYLYLMNY

SEQ ID NO: 17489 - protein, 12 aa, Artificial
  helical interface sequence
LKKLVYLYLMNY

SEQ ID NO: 17490 - protein, 10 aa, Artificial
  helical interface sequence
PMEMREACER

SEQ ID NO: 17491 - protein, 22 aa, Artificial
  helical interface sequence
PQVCAKLFGNIQKVVNFWLLHN

SEQ ID NO: 17492 - protein, 14 aa, Artificial
  helical interface sequence
WQMLEMLKPCVEDG

SEQ ID NO: 17493 - protein, 7 aa, Artificial
  helical interface sequence
LIEKFLR

SEQ ID NO: 17494 - protein, 11 aa, Artificial
  helical interface sequence
IEYIKDLLENM

SEQ ID NO: 17495 - protein, 16 aa, Artificial
  helical interface sequence
IEPLKELEKAYKRFKD

SEQ ID NO: 17496 - protein, 6 aa, Artificial
  helical interface sequence
LRDLII

SEQ ID NO: 17497 - protein, 10 aa, Artificial
  helical interface sequence
KSALTIQLIQ

SEQ ID NO: 17498 - protein, 13 aa, Artificial
  helical interface sequence
SAEFIKNLSSIRR

SEQ ID NO: 17499 - protein, 13 aa, Artificial
  helical interface sequence
SAEFIKNLSSIRR

SEQ ID NO: 17500 - protein, 13 aa, Artificial
  helical interface sequence
SAEFIKNLSSIRR

SEQ ID NO: 17501 - protein, 10 aa, Artificial
  helical interface sequence
YEEFVQMMTA

SEQ ID NO: 17502 - protein, 22 aa, Artificial
  helical interface sequence
PVTNICQAADKQLFTLVEWAKR

SEQ ID NO: 17503 - protein, 12 aa, Artificial
  helical interface sequence
RDDLKKLLETES

SEQ ID NO: 17504 - protein, 23 aa, Artificial
  helical interface sequence
LVSGLIEARKYLEQLHRKLKNCK

SEQ ID NO: 17505 - protein, 23 aa, Artificial
  helical interface sequence
PVTNICQAADKQLFTLVEWAKRI

SEQ ID NO: 17506 - protein, 19 aa, Artificial
  helical interface sequence
PANFKILSHCILVLLAVKF

SEQ ID NO: 17507 - protein, 10 aa, Artificial
  helical interface sequence
MDNAADFCQL

SEQ ID NO: 17508 - protein, 13 aa, Artificial
  helical interface sequence
QEELEFCEKLLQT

SEQ ID NO: 17509 - protein, 22 aa, Artificial
  helical interface sequence
AEVEALREKVYASLEAYCKHKY

SEQ ID NO: 17510 - protein, 45 aa, Artificial
  helical interface sequence
VPARDYLIDGSRGILSGTSDLLLTFDEAEVRKIIRVCKGILEYLT

SEQ ID NO: 17511 - protein, 15 aa, Artificial
  helical interface sequence
RRMGVEMTLLRALAF

SEQ ID NO: 17512 - protein, 12 aa, Artificial
  helical interface sequence
APARLHWLATLL

SEQ ID NO: 17513 - protein, 13 aa, Artificial
  helical interface sequence
EHVLTALANGLSL

SEQ ID NO: 17514 - protein, 14 aa, Artificial
  helical interface sequence
RMHESMKLFDSICN

SEQ ID NO: 17515 - protein, 15 aa, Artificial
  helical interface sequence
PFEATTAFAVKAKEY

SEQ ID NO: 17516 - protein, 23 aa, Artificial
  helical interface sequence
PAAEKMQVLQVLDRLRGKLQEKG

SEQ ID NO: 17517 - protein, 23 aa, Artificial
  helical interface sequence
VGDAQVLVRYMKAELELYRLQRR

SEQ ID NO: 17518 - protein, 7 aa, Artificial
  helical interface sequence
FFAENEQ

SEQ ID NO: 17519 - protein, 12 aa, Artificial
  helical interface sequence
AHKFPDFVHAVK

SEQ ID NO: 17520 - protein, 15 aa, Artificial
  helical interface sequence
DAAAAIVQAQWEDVW

SEQ ID NO: 17521 - protein, 16 aa, Artificial
  helical interface sequence
PDAWASCLAGIAAAIS

SEQ ID NO: 17522 - protein, 16 aa, Artificial
  helical interface sequence
PDAWSRCFNRITTGMT

SEQ ID NO: 17523 - protein, 16 aa, Artificial
  helical interface sequence
PDAWASCLAGIAAAIS

SEQ ID NO: 17524 - protein, 7 aa, Artificial
  helical interface sequence
TLNYIDK

SEQ ID NO: 17525 - protein, 6 aa, Artificial
  helical interface sequence
VHIGLA

SEQ ID NO: 17526 - protein, 13 aa, Artificial
  helical interface sequence
ELGRPDAEYWNSQ

SEQ ID NO: 17527 - protein, 8 aa, Artificial
  helical interface sequence
PLYVMAQS

SEQ ID NO: 17528 - protein, 15 aa, Artificial
  helical interface sequence
VGVVAAESIGEPGTQ

SEQ ID NO: 17529 - protein, 11 aa, Artificial
  helical interface sequence
SFAQAEARIQM

SEQ ID NO: 17530 - protein, 13 aa, Artificial
  helical interface sequence
KAEVAAEFLNDRV

SEQ ID NO: 17531 - protein, 12 aa, Artificial
  helical interface sequence
DEEVDEMIREAD

SEQ ID NO: 17532 - protein, 11 aa, Artificial
  helical interface sequence
IEELGEILRAT

SEQ ID NO: 17533 - protein, 19 aa, Artificial
  helical interface sequence
TSMASPHVAGAAALILSKH

SEQ ID NO: 17534 - protein, 9 aa, Artificial
  helical interface sequence
RSVTRSYYR

SEQ ID NO: 17535 - protein, 17 aa, Artificial
  helical interface sequence
MHLLSCLESLRVSLNNN

SEQ ID NO: 17536 - protein, 10 aa, Artificial
  helical interface sequence
EEKQQPLREK

SEQ ID NO: 17537 - protein, 10 aa, Artificial
  helical interface sequence
LPALRSIGLK

SEQ ID NO: 17538 - protein, 6 aa, Artificial
  helical interface sequence
PTSRAE

SEQ ID NO: 17539 - protein, 13 aa, Artificial
  helical interface sequence
EALGEFIFDKKLL

SEQ ID NO: 17540 - protein, 13 aa, Artificial
  helical interface sequence
EALGEFIFDKKLL

SEQ ID NO: 17541 - protein, 13 aa, Artificial
  helical interface sequence
EALGEFIFDKKLL

SEQ ID NO: 17542 - protein, 15 aa, Artificial
  helical interface sequence
IPAFADRLGQYVQAH

SEQ ID NO: 17543 - protein, 23 aa, Artificial
  helical interface sequence
AGDTVQFAEYIQANIQLYSIRED

SEQ ID NO: 17544 - protein, 11 aa, Artificial
  helical interface sequence
LIMPFLDNQVN

SEQ ID NO: 17545 - protein, 11 aa, Artificial
  helical interface sequence
LIMPFLDNQVN

SEQ ID NO: 17546 - protein, 17 aa, Artificial
  helical interface sequence
PQAVSSFVRQELAKSIR

SEQ ID NO: 17547 - protein, 22 aa, Artificial
  helical interface sequence
AADTQAIADIVQYHLELYTSQY

SEQ ID NO: 17548 - protein, 7 aa, Artificial
  helical interface sequence
DEQLKSG

SEQ ID NO: 17549 - protein, 7 aa, Artificial
  helical interface sequence
SEQLASG

SEQ ID NO: 17550 - protein, 11 aa, Artificial
  helical interface sequence
VGRVHRLLRKG

SEQ ID NO: 17551 - protein, 11 aa, Artificial
  helical interface sequence
VGRVHRLLRKG

SEQ ID NO: 17552 - protein, 27 aa, Artificial
  helical interface sequence
IYEETRGVLKVFLENVIRDAVTYTEHA

SEQ ID NO: 17553 - protein, 14 aa, Artificial
  helical interface sequence
EFFGAVREVYETVY

SEQ ID NO: 17554 - protein, 17 aa, Artificial
  helical interface sequence
HFMALLQTHDVVAHEVY

SEQ ID NO: 17555 - protein, 14 aa, Artificial
  helical interface sequence
KLPFQRLVREIAQD

SEQ ID NO: 17556 - protein, 10 aa, Artificial
  helical interface sequence
PRHLQLAVRN

SEQ ID NO: 17557 - protein, 15 aa, Artificial
  helical interface sequence
DVLDVLLEHFVKITE

SEQ ID NO: 17558 - protein, 14 aa, Artificial
  helical interface sequence
LGPFIVDLITFTEG

SEQ ID NO: 17559 - protein, 5 aa, Artificial
  helical interface sequence
HTVAA

SEQ ID NO: 17560 - protein, 26 aa, Artificial
  helical interface sequence
AASLHWTGERVVSVLLLGLLPAAYLN

SEQ ID NO: 17561 - protein, 6 aa, Artificial
  helical interface sequence
SEQLTS

SEQ ID NO: 17562 - protein, 6 aa, Artificial
  helical interface sequence
CEDIAR

SEQ ID NO: 17563 - protein, 9 aa, Artificial
  helical interface sequence
PAARNILEK

SEQ ID NO: 17564 - protein, 6 aa, Artificial
  helical interface sequence
LEQLIA

SEQ ID NO: 17565 - protein, 11 aa, Artificial
  helical interface sequence
VPLIRRAWELG

SEQ ID NO: 17566 - protein, 9 aa, Artificial
  helical interface sequence
QAVLSLYAS

SEQ ID NO: 17567 - protein, 20 aa, Artificial
  helical interface sequence
TCGIADFLSTYQTKVDKDLQ

SEQ ID NO: 17568 - protein, 14 aa, Artificial
  helical interface sequence
VRNLFVYTSLFIKT

SEQ ID NO: 17569 - protein, 8 aa, Artificial
  helical interface sequence
TDILLMLK

SEQ ID NO: 17570 - protein, 6 aa, Artificial
  helical interface sequence
VSILIP

SEQ ID NO: 17571 - protein, 7 aa, Artificial
  helical interface sequence
LFFFKLI

SEQ ID NO: 17572 - protein, 29 aa, Artificial
  helical interface sequence
FFVKFIMWGILTALAYHVVVGIRHMMMDF

SEQ ID NO: 17573 - protein, 10 aa, Artificial
  helical interface sequence
YEVWIGFFAS

SEQ ID NO: 17574 - protein, 30 aa, Artificial; identical to SEQ ID NO: 12597
  helical interface sequence

SEQ ID NO: 17575 - protein, 29 aa, Artificial
  helical interface sequence
ESIQKKCEEVIAKYKPEWEAVVAKYRPRL

SEQ ID NO: 17576 - protein, 12 aa, Artificial
  helical interface sequence
GYEFEEFVKRIK

SEQ ID NO: 17577 - protein, 16 aa, Artificial
  helical interface sequence
FDGFAIFARDMDMTLN

SEQ ID NO: 17578 - protein, 12 aa, Artificial
  helical interface sequence
GYEFEEFVKRIK

SEQ ID NO: 17579 - protein, 6 aa, Artificial
  helical interface sequence
SEQLTS

SEQ ID NO: 17580 - protein, 29 aa, Artificial
  helical interface sequence
PEYWDRNTQIFKTNTQTYRESLRNLRGYY

SEQ ID NO: 17581 - protein, 13 aa, Artificial
  helical interface sequence
LCVEWLRRYLENG

SEQ ID NO: 17582 - protein, 16 aa, Artificial
  helical interface sequence
KGLLDVTCKTVANMIK

SEQ ID NO: 17583 - protein, 17 aa, Artificial
  helical interface sequence
PTEALSVAVEEGLAWRK

SEQ ID NO: 17584 - protein, 8 aa, Artificial
  helical interface sequence
EEYIRKAI

SEQ ID NO: 17585 - protein, 5 aa, Artificial
  helical interface sequence
NAIAF

SEQ ID NO: 17586 - protein, 17 aa, Artificial
  helical interface sequence
PFHMMGVAGVLGGALLC

SEQ ID NO: 17587 - protein, 6 aa, Artificial
  helical interface sequence
RYQWDS

SEQ ID NO: 17588 - protein, 16 aa, Artificial
  helical interface sequence
PRGWFTFAHAVFALLF

SEQ ID NO: 17589 - protein, 21 aa, Artificial
  helical interface sequence
FYTKNLLLNEGIRAWMAPQDQ

SEQ ID NO: 17590 - protein, 20 aa, Artificial
  helical interface sequence
TPLMAVFMGLFLVFLLIILE

SEQ ID NO: 17591 - protein, 21 aa, Artificial
  helical interface sequence
ETITYVFIFACIIALFFFAIF

SEQ ID NO: 17592 - protein, 17 aa, Artificial
  helical interface sequence
ITIPALFIAGWLFVSTG

SEQ ID NO: 17593 - protein, 17 aa, Artificial
  helical interface sequence
ITIPALFIAGWLFVSTG

SEQ ID NO: 17594 - protein, 6 aa, Artificial
  helical interface sequence
LAYDVF

SEQ ID NO: 17595 - protein, 10 aa, Artificial
  helical interface sequence
KKWIQKVIDQ

SEQ ID NO: 17596 - protein, 22 aa, Artificial
  helical interface sequence
PQVCAKLFGNIQKVVNFWLLHN

SEQ ID NO: 17597 - protein, 10 aa, Artificial
  helical interface sequence
FINIAQMSAC

SEQ ID NO: 17598 - protein, 12 aa, Artificial
  helical interface sequence
MKQYLKTKLLEE

SEQ ID NO: 17599 - protein, 7 aa, Artificial
  helical interface sequence
LIEKFLR

SEQ ID NO: 17600 - protein, 30 aa, Artificial; identical to SEQ ID NO: 4916
  helical interface sequence

SEQ ID NO: 17601 - protein, 13 aa, Artificial
  helical interface sequence
EVALQEYRTVARS

SEQ ID NO: 17602 - protein, 11 aa, Artificial
  helical interface sequence
TKELGTVMRSL

SEQ ID NO: 17603 - protein, 13 aa, Artificial
  helical interface sequence
EEQIAEFKEAFSL

SEQ ID NO: 17604 - protein, 25 aa, Artificial
  helical interface sequence
GKYLIFVMFVSLVIVTNCVIVLNVS

SEQ ID NO: 17605 - protein, 13 aa, Artificial
  helical interface sequence
DQVSEFKEAFELF

SEQ ID NO: 17606 - protein, 9 aa, Artificial
  helical interface sequence
DHLRRQRQE

SEQ ID NO: 17607 - protein, 28 aa, Artificial
  helical interface sequence
PDEFRQAFDLAVKGINIIYNLEREALKS

SEQ ID NO: 17608 - protein, 6 aa, Artificial
  helical interface sequence
KKLTEL

SEQ ID NO: 17609 - protein, 6 aa, Artificial
  helical interface sequence
VEGEKV

SEQ ID NO: 17610 - protein, 8 aa, Artificial
  helical interface sequence
LSEINRSF

SEQ ID NO: 17611 - protein, 29 aa, Artificial
  helical interface sequence
KEARAAIARAASVFAIFVTSSSTALAHKQ

SEQ ID NO: 17612 - protein, 8 aa, Artificial
  helical interface sequence
WDTFVDLY

SEQ ID NO: 17613 - protein, 11 aa, Artificial
  helical interface sequence
TEKLSIMIEEC

SEQ ID NO: 17614 - protein, 13 aa, Artificial
  helical interface sequence
RRIIKETQRLLAE

SEQ ID NO: 17615 - protein, 13 aa, Artificial
  helical interface sequence
RRIIKETQRLLAE

SEQ ID NO: 17616 - protein, 17 aa, Artificial
  helical interface sequence
NSEVHMLLEHRKQQNES

SEQ ID NO: 17617 - protein, 8 aa, Artificial
  helical interface sequence
KELNDLAR

SEQ ID NO: 17618 - protein, 14 aa, Artificial
  helical interface sequence
SNKRLDVVNRLTSN

SEQ ID NO: 17619 - protein, 6 aa, Artificial
  helical interface sequence
WVAFGE

SEQ ID NO: 17620 - protein, 6 aa, Artificial
  helical interface sequence
WVAFGE

SEQ ID NO: 17621 - protein, 7 aa, Artificial
  helical interface sequence
KVMCYAQ

SEQ ID NO: 17622 - protein, 18 aa, Artificial
  helical interface sequence
EEDLKATLREIRRALMDA

SEQ ID NO: 17623 - protein, 11 aa, Artificial
  helical interface sequence
PRDLISLGVVI

SEQ ID NO: 17624 - protein, 7 aa, Artificial
  helical interface sequence
SEQLTSG

SEQ ID NO: 17625 - protein, 17 aa, Artificial
  helical interface sequence
PAVLNEQLAHLSAQHQA

SEQ ID NO: 17626 - protein, 7 aa, Artificial
  helical interface sequence
YSAMERG

SEQ ID NO: 17627 - protein, 15 aa, Artificial
  helical interface sequence
PTLDTLQLDVADFAT

SEQ ID NO: 17628 - protein, 9 aa, Artificial
  helical interface sequence
AEERRRKQN

SEQ ID NO: 17629 - protein, 10 aa, Artificial
  helical interface sequence
PNYRRRLVRW

SEQ ID NO: 17630 - protein, 7 aa, Artificial
  helical interface sequence
QTVYLGM

SEQ ID NO: 17631 - protein, 9 aa, Artificial
  helical interface sequence
AEERRRKQN

SEQ ID NO: 17632 - protein, 6 aa, Artificial
  helical interface sequence
SEEFQA

SEQ ID NO: 17633 - protein, 5 aa, Artificial
  helical interface sequence
RKQQT

SEQ ID NO: 17634 - protein, 8 aa, Artificial
  helical interface sequence
PLTMYAND

SEQ ID NO: 17635 - protein, 9 aa, Artificial
  helical interface sequence
LGTVMRSLG

SEQ ID NO: 17636 - protein, 6 aa, Artificial
  helical interface sequence
LGTVMR

SEQ ID NO: 17637 - protein, 10 aa, Artificial
  helical interface sequence
EAELQDMINE

SEQ ID NO: 17638 - protein, 6 aa, Artificial
  helical interface sequence
AFQLFD

SEQ ID NO: 17639 - protein, 8 aa, Artificial
  helical interface sequence
PLHYAASK

SEQ ID NO: 17640 - protein, 9 aa, Artificial
  helical interface sequence
AEERRRKQN

SEQ ID NO: 17641 - protein, 8 aa, Artificial
  helical interface sequence
HTLFRAYT

SEQ ID NO: 17642 - protein, 5 aa, Artificial
  helical interface sequence
QKDLW

SEQ ID NO: 17643 - protein, 10 aa, Artificial
  helical interface sequence
PNYRRRLVRW

SEQ ID NO: 17644 - protein, 6 aa, Artificial
  helical interface sequence
AEDEAF

SEQ ID NO: 17645 - protein, 9 aa, Artificial
  helical interface sequence
AEERRRKQN

SEQ ID NO: 17646 - protein, 6 aa, Artificial
  helical interface sequence
AEDEAF

SEQ ID NO: 17647 - protein, 10 aa, Artificial
  helical interface sequence
PNYRRRLVRW

SEQ ID NO: 17648 - protein, 5 aa, Artificial
  helical interface sequence
MVGVN

SEQ ID NO: 17649 - protein, 9 aa, Artificial
  helical interface sequence
ATELVQACR

SEQ ID NO: 17650 - protein, 31 aa, Artificial; identical to SEQ ID NO: 1545
  helical interface sequence

SEQ ID NO: 17651 - protein, 5 aa, Artificial
  helical interface sequence
QMTAF

SEQ ID NO: 17652 - protein, 11 aa, Artificial
  helical interface sequence
RICLRELAHKG

SEQ ID NO: 17653 - protein, 14 aa, Artificial
  helical interface sequence
PEIVECVMEQLEHM

SEQ ID NO: 17654 - protein, 8 aa, Artificial
  helical interface sequence
KDEMRMTF

SEQ ID NO: 17655 - protein, 10 aa, Artificial
  helical interface sequence
KSSLVLRFVK

SEQ ID NO: 17656 - protein, 16 aa, Artificial
  helical interface sequence
ADEFLPVLIYVTIKAN

SEQ ID NO: 17657 - protein, 10 aa, Artificial
  helical interface sequence
KSSLVLRFVK

SEQ ID NO: 17658 - protein, 9 aa, Artificial
  helical interface sequence
KEEFQLALF

SEQ ID NO: 17659 - protein, 11 aa, Artificial
  helical interface sequence
LFADRIFDVFD

SEQ ID NO: 17660 - protein, 9 aa, Artificial
  helical interface sequence
AAEVEFLAE

SEQ ID NO: 17661 - protein, 5 aa, Artificial
  helical interface sequence
ALRFH

SEQ ID NO: 17662 - protein, 5 aa, Artificial
  helical interface sequence
LTKLL

SEQ ID NO: 17663 - protein, 18 aa, Artificial
  helical interface sequence
KDEIEEVREVFDLFDFWD

SEQ ID NO: 17664 - protein, 11 aa, Artificial
  helical interface sequence
RTITTAYYRGA

SEQ ID NO: 17665 - protein, 18 aa, Artificial
  helical interface sequence
GDEQRRQRHDLERIRIAN

SEQ ID NO: 17666 - protein, 32 aa, Artificial
  helical interface sequence
PEAAARAAQMQQDDEAWQTRYQAYAAERDRIA

SEQ ID NO: 17667 - protein, 9 aa, Artificial
  helical interface sequence
RAVREFFDY

SEQ ID NO: 17668 - protein, 10 aa, Artificial
  helical interface sequence
QISEQKSNDA

SEQ ID NO: 17669 - protein, 6 aa, Artificial
  helical interface sequence
GGALGI

SEQ ID NO: 17670 - protein, 26 aa, Artificial
  helical interface sequence
TDLVETLELQNLMLCALQTIYGAEAR

SEQ ID NO: 17671 - protein, 6 aa, Artificial
  helical interface sequence
NCTRTC

SEQ ID NO: 17672 - protein, 23 aa, Artificial
  helical interface sequence
AAVAVEFARLYAVELEHYEKLEG

SEQ ID NO: 17673 - protein, 19 aa, Artificial
  helical interface sequence
EDELKEQLLDRIGQCVMTA

SEQ ID NO: 17674 - protein, 10 aa, Artificial
  helical interface sequence
QKIRGQMPER

SEQ ID NO: 17675 - protein, 11 aa, Artificial
  helical interface sequence
AMDVVYALKRQ

SEQ ID NO: 17676 - protein, 12 aa, Artificial
  helical interface sequence
VGRVHRLLRKGN

SEQ ID NO: 17677 - protein, 29 aa, Artificial
  helical interface sequence
SKAMSIMNSFVNDVFERIAGEASRLAHYN

SEQ ID NO: 17678 - protein, 26 aa, Artificial
  helical interface sequence
PAIGIPALLGSVTVIAILVHLAILSH

SEQ ID NO: 17679 - protein, 26 aa, Artificial
  helical interface sequence
PAIGIPALLGSVTVIAILVHLAILSH

SEQ ID NO: 17680 - protein, 26 aa, Artificial
  helical interface sequence
PAIGIPALLGSVTVIAILVHLAILSH

SEQ ID NO: 17681 - protein, 23 aa, Artificial
  helical interface sequence
MSSAKAALESDTRVLAYHLGRNY

SEQ ID NO: 17682 - protein, 13 aa, Artificial
  helical interface sequence
KDLLEQRRAAVDT

SEQ ID NO: 17683 - protein, 11 aa, Artificial
  helical interface sequence
QDFLEETFAKY

SEQ ID NO: 17684 - protein, 16 aa, Artificial
  helical interface sequence
KERFFALADRAREALA

SEQ ID NO: 17685 - protein, 5 aa, Artificial
  helical interface sequence
PAEFR

SEQ ID NO: 17686 - protein, 7 aa, Artificial
  helical interface sequence
KPQRREA

SEQ ID NO: 17687 - protein, 11 aa, Artificial
  helical interface sequence
RCVRYFEEVPG

SEQ ID NO: 17688 - protein, 13 aa, Artificial
  helical interface sequence
AEELWDYLTETLG

SEQ ID NO: 17689 - protein, 13 aa, Artificial
  helical interface sequence
PSFVNLQSLPYAC

SEQ ID NO: 17690 - protein, 5 aa, Artificial
  helical interface sequence
PAEFR

SEQ ID NO: 17691 - protein, 19 aa, Artificial
  helical interface sequence
ANAILAVSLANAKAAAAAK

SEQ ID NO: 17692 - protein, 18 aa, Artificial
  helical interface sequence
SDRVAKYNQLIRIEEALG

SEQ ID NO: 17693 - protein, 19 aa, Artificial
  helical interface sequence
ANAILAVSLANAKAAAAAK

SEQ ID NO: 17694 - protein, 18 aa, Artificial
  helical interface sequence
SDRVAKYNQLIRIEEALG

SEQ ID NO: 17695 - protein, 28 aa, Artificial
  helical interface sequence
LMARKQAGFTAVMFLTVLSVLLYLTNKR

SEQ ID NO: 17696 - protein, 28 aa, Artificial
  helical interface sequence
LMARKQAGFTAVMFLTVLSVLLYLTNKR

SEQ ID NO: 17697 - protein, 17 aa, Artificial
  helical interface sequence
QMSFWGATVITGLFGAI

SEQ ID NO: 17698 - protein, 31 aa, Artificial
  helical interface sequence
NATLNRFFSLHYLLPFVIAALVAIHIWAFHS

SEQ ID NO: 17699 - protein, 5 aa, Artificial
  helical interface sequence
SEEFQ

SEQ ID NO: 17700 - protein, 10 aa, Artificial
  helical interface sequence
RPDAEYWNSQ

SEQ ID NO: 17701 - protein, 20 aa, Artificial
  helical interface sequence
QAQETQGQAAARAAAADLAA

SEQ ID NO: 17702 - protein, 7 aa, Artificial
  helical interface sequence
SEQLTSG

SEQ ID NO: 17703 - protein, 6 aa, Artificial
  helical interface sequence
SEQLTS

SEQ ID NO: 17704 - protein, 12 aa, Artificial
  helical interface sequence
CSGAVNKVLTKL

SEQ ID NO: 17705 - protein, 14 aa, Artificial
  helical interface sequence
DKCDRLRKAYGEAC

SEQ ID NO: 17706 - protein, 10 aa, Artificial
  helical interface sequence
PDEALLAVAH

SEQ ID NO: 17707 - protein, 5 aa, Artificial
  helical interface sequence
FRQNL

SEQ ID NO: 17708 - protein, 12 aa, Artificial
  helical interface sequence
HVDLAYLVGVCK

SEQ ID NO: 17709 - protein, 12 aa, Artificial
  helical interface sequence
HVDLAYLVGVCK

SEQ ID NO: 17710 - protein, 11 aa, Artificial
  helical interface sequence
KTLLFVRLLTG

SEQ ID NO: 17711 - protein, 15 aa, Artificial
  helical interface sequence
PRTLNAWVKVVEEKA

SEQ ID NO: 17712 - protein, 15 aa, Artificial
  helical interface sequence
MDKINNRFNYLFEVN

SEQ ID NO: 17713 - protein, 18 aa, Artificial
  helical interface sequence
DTHIRELEDYIDNLLVRV

SEQ ID NO: 17714 - protein, 14 aa, Artificial
  helical interface sequence
LSVYQKMKFNVAMG

SEQ ID NO: 17715 - protein, 15 aa, Artificial
  helical interface sequence
QSRIVEWKERLDKEF

SEQ ID NO: 17716 - protein, 11 aa, Artificial
  helical interface sequence
PGRDRRTEEEN

SEQ ID NO: 17717 - protein, 9 aa, Artificial
  helical interface sequence
ERVVAWLDS

SEQ ID NO: 17718 - protein, 18 aa, Artificial
  helical interface sequence
KTLLENTAITIGRLGYVC

SEQ ID NO: 17719 - protein, 19 aa, Artificial
  helical interface sequence
KRVQEAACSAFATLEEEAC

SEQ ID NO: 17720 - protein, 11 aa, Artificial
  helical interface sequence
YPQGLAMAKEI

SEQ ID NO: 17721 - protein, 13 aa, Artificial
  helical interface sequence
PQTREHILLGRQV

SEQ ID NO: 17722 - protein, 9 aa, Artificial
  helical interface sequence
ICLRELAHK

SEQ ID NO: 17723 - protein, 65 aa, Artificial; identical to SEQ ID NO: 7671
  helical interface sequence

SEQ ID NO: 17724 - protein, 46 aa, Artificial; identical to SEQ ID NO: 5279
  helical interface sequence

SEQ ID NO: 17725 - protein, 6 aa, Artificial
  helical interface sequence
RGISEL

SEQ ID NO: 17726 - protein, 8 aa, Artificial
  helical interface sequence
QDIIAILG

SEQ ID NO: 17727 - protein, 15 aa, Artificial
  helical interface sequence
TREGNDLYREMKETG

SEQ ID NO: 17728 - protein, 15 aa, Artificial
  helical interface sequence
KIQKLESDVSAQMEY

SEQ ID NO: 17729 - protein, 33 aa, Artificial; identical to SEQ ID NO: 1595
  helical interface sequence

SEQ ID NO: 17730 - protein, 15 aa, Artificial
  helical interface sequence
EEQIAEFKEAFSLFD

SEQ ID NO: 17731 - protein, 16 aa, Artificial
  helical interface sequence
KEQSAQAAQWESVLKS

SEQ ID NO: 17732 - protein, 5 aa, Artificial
  helical interface sequence
GIYAA

SEQ ID NO: 17733 - protein, 6 aa, Artificial
  helical interface sequence
HEILEM

SEQ ID NO: 17734 - protein, 8 aa, Artificial
  helical interface sequence
IDTILSSK

SEQ ID NO: 17735 - protein, 13 aa, Artificial
  helical interface sequence
PFAAQVAAERCAD

SEQ ID NO: 17736 - protein, 11 aa, Artificial
  helical interface sequence
ISAYDDELAFY

SEQ ID NO: 17737 - protein, 13 aa, Artificial
  helical interface sequence
VHEKLRWTFNLYD

SEQ ID NO: 17738 - protein, 5 aa, Artificial
  helical interface sequence
TEKEF

SEQ ID NO: 17739 - protein, 12 aa, Artificial
  helical interface sequence
EDTFKQIYAQFF

SEQ ID NO: 17740 - protein, 14 aa, Artificial
  helical interface sequence
DIGKNIVTALLRAN

SEQ ID NO: 17741 - protein, 20 aa, Artificial
  helical interface sequence
LPNVMMSADAMLEGIEYCKE

SEQ ID NO: 17742 - protein, 8 aa, Artificial
  helical interface sequence
EASLKKVL

SEQ ID NO: 17743 - protein, 8 aa, Artificial
  helical interface sequence
EASLKKVL

SEQ ID NO: 17744 - protein, 22 aa, Artificial
  helical interface sequence
TVQCWSETLAYDCALMNTALET

SEQ ID NO: 17745 - protein, 22 aa, Artificial
  helical interface sequence
TVQCWSETLAYDCALMNTALET

SEQ ID NO: 17746 - protein, 15 aa, Artificial
  helical interface sequence
DIGKNIVTALLRANG

SEQ ID NO: 17747 - protein, 18 aa, Artificial
  helical interface sequence
IDDALMVGMGVVIRLYDE

SEQ ID NO: 17748 - protein, 21 aa, Artificial
  helical interface sequence
QGALANIAVDKANLEIMTKRS

SEQ ID NO: 17749 - protein, 13 aa, Artificial
  helical interface sequence
ELGRPDAEYWNSQ

SEQ ID NO: 17750 - protein, 9 aa, Artificial
  helical interface sequence
RPDAEYWNS

SEQ ID NO: 17751 - protein, 21 aa, Artificial
  helical interface sequence
SNFEATKKSVLKQVQDFEDND

SEQ ID NO: 17752 - protein, 27 aa, Artificial
  helical interface sequence
VGTIFAGAFVFQTVFDTAITSWYENHN

SEQ ID NO: 17753 - protein, 9 aa, Artificial
  helical interface sequence
CDYIFSLLT

SEQ ID NO: 17754 - protein, 30 aa, Artificial; identical to SEQ ID NO: 1386
  helical interface sequence

SEQ ID NO: 17755 - protein, 11 aa, Artificial
  helical interface sequence
QSKIWDVVEKA

SEQ ID NO: 17756 - protein, 7 aa, Artificial
  helical interface sequence
EEFGRFA

SEQ ID NO: 17757 - protein, 9 aa, Artificial
  helical interface sequence
ADEFMDYIR

SEQ ID NO: 17758 - protein, 16 aa, Artificial
  helical interface sequence
WRVRLAIIEYMPLLAG

SEQ ID NO: 17759 - protein, 5 aa, Artificial
  helical interface sequence
TTVSQ

SEQ ID NO: 17760 - protein, 7 aa, Artificial
  helical interface sequence
RYQEASY

SEQ ID NO: 17761 - protein, 8 aa, Artificial
  helical interface sequence
FYPKLKSG

SEQ ID NO: 17762 - protein, 29 aa, Artificial
  helical interface sequence
SSAVMALQEASEAYLVGLFEDTNLCAIHA

SEQ ID NO: 17763 - protein, 12 aa, Artificial
  helical interface sequence
PKDIQLARRIRG

SEQ ID NO: 17764 - protein, 9 aa, Artificial
  helical interface sequence
AAELRHVMT

SEQ ID NO: 17765 - protein, 8 aa, Artificial
  helical interface sequence
LGTVMRSL

SEQ ID NO: 17766 - protein, 11 aa, Artificial
  helical interface sequence
EDLLRGIYAYG

SEQ ID NO: 17767 - protein, 27 aa, Artificial
  helical interface sequence
QRLKRLVNEGIGYGLALEGITATDLRN

SEQ ID NO: 17768 - protein, 10 aa, Artificial
  helical interface sequence
QRLKRLVNEG

SEQ ID NO: 17769 - protein, 14 aa, Artificial
  helical interface sequence
PSLRNIYAELHRSL

SEQ ID NO: 17770 - protein, 25 aa, Artificial
  helical interface sequence
EASMMGLLTNLADRELVHMINWAKR

SEQ ID NO: 17771 - protein, 25 aa, Artificial
  helical interface sequence
EASMMGLLTNLADRELVHMINWAKR

SEQ ID NO: 17772 - protein, 28 aa, Artificial
  helical interface sequence
LKSLEEKDHIHRVLDKITDTLIHLMAKA

SEQ ID NO: 17773 - protein, 15 aa, Artificial
  helical interface sequence
LASRCWENLILAMLG

SEQ ID NO: 17774 - protein, 17 aa, Artificial
  helical interface sequence
LLEEDKICGYVAGGLMY

SEQ ID NO: 17775 - protein, 15 aa, Artificial
  helical interface sequence
LSKQAVAYRQMSLLL

SEQ ID NO: 17776 - protein, 70 aa, Artificial; identical to SEQ ID NO: 7956
  helical interface sequence

SEQ ID NO: 17777 - protein, 38 aa, Artificial; identical to SEQ ID NO: 10974
  helical interface sequence

SEQ ID NO: 17778 - protein, 70 aa, Artificial; identical to SEQ ID NO: 7956
  helical interface sequence

SEQ ID NO: 17779 - protein, 6 aa, Artificial
  helical interface sequence
RAIAEL

SEQ ID NO: 17780 - protein, 5 aa, Artificial
  helical interface sequence
EVFTG

SEQ ID NO: 17781 - protein, 18 aa, Artificial
  helical interface sequence
PMVVANAVAALSEISESH

SEQ ID NO: 17782 - protein, 5 aa, Artificial
  helical interface sequence
LASVY

SEQ ID NO: 17783 - protein, 18 aa, Artificial
  helical interface sequence
VDFVRKAVRAIGRCAIKV

SEQ ID NO: 17784 - protein, 11 aa, Artificial
  helical interface sequence
QTKVLKQLLML

SEQ ID NO: 17785 - protein, 27 aa, Artificial
  helical interface sequence
DKAKQSIRAKCTEYLDRAEKLKEYLKN

SEQ ID NO: 17786 - protein, 21 aa, Artificial
  helical interface sequence
ELAKHAVSEGTRAVTKYSSST

SEQ ID NO: 17787 - protein, 15 aa, Artificial
  helical interface sequence
DAEIVKLMDDLDRNK

SEQ ID NO: 17788 - protein, 22 aa, Artificial
  helical interface sequence
SEQIMKTGALLLQGFIQDRAGR

SEQ ID NO: 17789 - protein, 11 aa, Artificial
  helical interface sequence
SDLVEALYLVC

SEQ ID NO: 17790 - protein, 21 aa, Artificial
  helical interface sequence
DEEMKAMLSYYYSTVMEQQVN

SEQ ID NO: 17791 - protein, 13 aa, Artificial
  helical interface sequence
TVALREIRRYQKS

SEQ ID NO: 17792 - protein, 12 aa, Artificial
  helical interface sequence
SREIQTAVRLLL

SEQ ID NO: 17793 - protein, 18 aa, Artificial
  helical interface sequence
EKQYETLENQLAFLTQQG

SEQ ID NO: 17794 - protein, 5 aa, Artificial
  helical interface sequence
SEELE

SEQ ID NO: 17795 - protein, 11 aa, Artificial
  helical interface sequence
SSVKKILSKAS

SEQ ID NO: 17796 - protein, 19 aa, Artificial
  helical interface sequence
KASYENVAKKWIPELRHYA

SEQ ID NO: 17797 - protein, 14 aa, Artificial
  helical interface sequence
VKAVFDAAIKVVLQ

SEQ ID NO: 17798 - protein, 12 aa, Artificial
  helical interface sequence
CKDSILEAIDAG

SEQ ID NO: 17799 - protein, 10 aa, Artificial
  helical interface sequence
ERVKRGMAEM

SEQ ID NO: 17800 - protein, 14 aa, Artificial
  helical interface sequence
PAKFAKAIVEATTH

SEQ ID NO: 17801 - protein, 11 aa, Artificial
  helical interface sequence
VREHIHAIEAC

SEQ ID NO: 17802 - protein, 11 aa, Artificial
  helical interface sequence
DDYVHEFCRYG

SEQ ID NO: 17803 - protein, 11 aa, Artificial
  helical interface sequence
LGCELLKNLAL

SEQ ID NO: 17804 - protein, 14 aa, Artificial
  helical interface sequence
GLCVEWLRRYLENG

SEQ ID NO: 17805 - protein, 22 aa, Artificial
  helical interface sequence
GWKVEKIQEIYLEALRAYVDNR

SEQ ID NO: 17806 - protein, 11 aa, Artificial
  helical interface sequence
VGRVHRLLRKG

SEQ ID NO: 17807 - protein, 22 aa, Artificial
  helical interface sequence
SHCWLRDMVIQLSLSLTTLLDK

SEQ ID NO: 17808 - protein, 9 aa, Artificial
  helical interface sequence
YEEFVQMMT

SEQ ID NO: 17809 - protein, 15 aa, Artificial
  helical interface sequence
IKLARQLISKDLHDD

SEQ ID NO: 17810 - protein, 6 aa, Artificial
  helical interface sequence
GPAKMI

SEQ ID NO: 17811 - protein, 13 aa, Artificial
  helical interface sequence
LKGHVESVVKLKG

SEQ ID NO: 17812 - protein, 20 aa, Artificial
  helical interface sequence
SKVFYLKMKGDYHRYLAEFK

SEQ ID NO: 17813 - protein, 9 aa, Artificial
  helical interface sequence
IEDQISLLK

SEQ ID NO: 17814 - protein, 13 aa, Artificial
  helical interface sequence
FQTREATRKNLQE

SEQ ID NO: 17815 - protein, 9 aa, Artificial
  helical interface sequence
EEECELVCK

SEQ ID NO: 17816 - protein, 10 aa, Artificial
  helical interface sequence
DRQINQLAQR

SEQ ID NO: 17817 - protein, 16 aa, Artificial
  helical interface sequence
VQSQVVEAFIRWRQRF

SEQ ID NO: 17818 - protein, 9 aa, Artificial
  helical interface sequence
FPVLDLLQS

SEQ ID NO: 17819 - protein, 6 aa, Artificial
  helical interface sequence
SEQLTS

SEQ ID NO: 17820 - protein, 7 aa, Artificial
  helical interface sequence
LYQLENY

SEQ ID NO: 17821 - protein, 7 aa, Artificial
  helical interface sequence
LYQLENY

SEQ ID NO: 17822 - protein, 5 aa, Artificial
  helical interface sequence
IVEQC

SEQ ID NO: 17823 - protein, 19 aa, Artificial
  helical interface sequence
VNQHLCGSHLVEALYLVCG

SEQ ID NO: 17824 - protein, 7 aa, Artificial
  helical interface sequence
LYQLENY

SEQ ID NO: 17825 - protein, 10 aa, Artificial
  helical interface sequence
KTCLLISYTT

SEQ ID NO: 17826 - protein, 10 aa, Artificial
  helical interface sequence
KTCLLISYTT

SEQ ID NO: 17827 - protein, 10 aa, Artificial
  helical interface sequence
KTCLLISYTT

SEQ ID NO: 17828 - protein, 10 aa, Artificial
  helical interface sequence
KTCLLISYTT

SEQ ID NO: 17829 - protein, 12 aa, Artificial
  helical interface sequence
HIDQLKLILRLV

SEQ ID NO: 17830 - protein, 9 aa, Artificial
  helical interface sequence
HLPLLCEDK

SEQ ID NO: 17831 - protein, 5 aa, Artificial
  helical interface sequence
PEEIR

SEQ ID NO: 17832 - protein, 8 aa, Artificial
  helical interface sequence
PLHLAAYD

SEQ ID NO: 17833 - protein, 8 aa, Artificial
  helical interface sequence
PLHLAAYD

SEQ ID NO: 17834 - protein, 9 aa, Artificial
  helical interface sequence
SFHSTVINH

SEQ ID NO: 17835 - protein, 7 aa, Artificial
  helical interface sequence
FSELIRD

SEQ ID NO: 17836 - protein, 8 aa, Artificial
  helical interface sequence
FDCFRMWF

SEQ ID NO: 17837 - protein, 14 aa, Artificial
  helical interface sequence
LGLYNEAVKIIHDF

SEQ ID NO: 17838 - protein, 14 aa, Artificial
  helical interface sequence
LGLYNEAVKIIHDF

SEQ ID NO: 17839 - protein, 14 aa, Artificial
  helical interface sequence
LGLYNEAVKIIHDF

SEQ ID NO: 17840 - protein, 5 aa, Artificial
  helical interface sequence
LHAAK

SEQ ID NO: 17841 - protein, 9 aa, Artificial
  helical interface sequence
SLFNKIKAS

SEQ ID NO: 17842 - protein, 15 aa, Artificial
  helical interface sequence
CHELNILENDFLKRV

SEQ ID NO: 17843 - protein, 9 aa, Artificial
  helical interface sequence
HMLPTVLRM

SEQ ID NO: 17844 - protein, 11 aa, Artificial
  helical interface sequence
IEAAREIIIRE

SEQ ID NO: 17845 - protein, 8 aa, Artificial
  helical interface sequence
WDGFVEFF

SEQ ID NO: 17846 - protein, 7 aa, Artificial
  helical interface sequence
GIFAQAL

SEQ ID NO: 17847 - protein, 24 aa, Artificial
  helical interface sequence
VFQKKKLGCQLLGKYKQIIAVLAQ

SEQ ID NO: 17848 - protein, 9 aa, Artificial
  helical interface sequence
KSQMKNILT

SEQ ID NO: 17849 - protein, 12 aa, Artificial
  helical interface sequence
DQEAIDALNAFS

SEQ ID NO: 17850 - protein, 16 aa, Artificial
  helical interface sequence
KSELTKFKIKITSELV

SEQ ID NO: 17851 - protein, 7 aa, Artificial
  helical interface sequence
GKALLLL

SEQ ID NO: 17852 - protein, 9 aa, Artificial
  helical interface sequence
PYRVLADLL

SEQ ID NO: 17853 - protein, 14 aa, Artificial
  helical interface sequence
QSTVAGVVETLRQH

SEQ ID NO: 17854 - protein, 13 aa, Artificial
  helical interface sequence
RSVKNTRQITKAM

SEQ ID NO: 17855 - protein, 15 aa, Artificial
  helical interface sequence
RVSRRRVAEIESEMN

SEQ ID NO: 17856 - protein, 11 aa, Artificial
  helical interface sequence
YHQRLRLLKSG

SEQ ID NO: 17857 - protein, 16 aa, Artificial
  helical interface sequence
GGEWQRVRLAAVVLQI

SEQ ID NO: 17858 - protein, 22 aa, Artificial
  helical interface sequence
IRLPRTLAVLLVGAALAISGAV

SEQ ID NO: 17859 - protein, 29 aa, Artificial
  helical interface sequence
RRDFLYYATAGAGAVATGAAVWPLINQMN

SEQ ID NO: 17860 - protein, 15 aa, Artificial
  helical interface sequence
QMSFWGATVITGLFG

SEQ ID NO: 17861 - protein, 15 aa, Artificial
  helical interface sequence
QMSFWGATVITGLFG

SEQ ID NO: 17862 - protein, 28 aa, Artificial
  helical interface sequence
RRDFLYYATAGAGAVATGAAVWPLINQM

SEQ ID NO: 17863 - protein, 15 aa, Artificial
  helical interface sequence
VDLAFASVEHIMRNV

SEQ ID NO: 17864 - protein, 11 aa, Artificial
  helical interface sequence
QSKIWDVVEKA

SEQ ID NO: 17865 - protein, 5 aa, Artificial
  helical interface sequence
MSTFS

SEQ ID NO: 17866 - protein, 11 aa, Artificial
  helical interface sequence
KTCLLISYTTN

SEQ ID NO: 17867 - protein, 16 aa, Artificial
  helical interface sequence
ATDRCCFVHDCCYGKL

SEQ ID NO: 17868 - protein, 11 aa, Artificial
  helical interface sequence
PSVIKGIAQQA

SEQ ID NO: 17869 - protein, 8 aa, Artificial
  helical interface sequence
FMDVYQRS

SEQ ID NO: 17870 - protein, 16 aa, Artificial
  helical interface sequence
APEILLAVYRALQRAG

SEQ ID NO: 17871 - protein, 15 aa, Artificial
  helical interface sequence
KPDQGRAVSTCAHLF

SEQ ID NO: 17872 - protein, 20 aa, Artificial
  helical interface sequence
PDNFRLLADCITVCVAAKLG

SEQ ID NO: 17873 - protein, 20 aa, Artificial
  helical interface sequence
PDNFRLLADCITVCVAAKLG

SEQ ID NO: 17874 - protein, 11 aa, Artificial
  helical interface sequence
LVTVTAELAAS

SEQ ID NO: 17875 - protein, 7 aa, Artificial
  helical interface sequence
PKKRMRY

SEQ ID NO: 17876 - protein, 19 aa, Artificial
  helical interface sequence
PVNFKLLSHCLLVTLANHH

SEQ ID NO: 17877 - protein, 5 aa, Artificial
  helical interface sequence
PAWQP

SEQ ID NO: 17878 - protein, 5 aa, Artificial
  helical interface sequence
PAWQP

SEQ ID NO: 17879 - protein, 22 aa, Artificial
  helical interface sequence
TENIRFVFAAVKDTILQLNLKE

SEQ ID NO: 17880 - protein, 11 aa, Artificial
  helical interface sequence
PVSIRHTSRRL

SEQ ID NO: 17881 - protein, 16 aa, Artificial
  helical interface sequence
VDEVGAEALGRLLVVY

SEQ ID NO: 17882 - protein, 13 aa, Artificial
  helical interface sequence
AALKAAVDKAVAS

SEQ ID NO: 17883 - protein, 8 aa, Artificial
  helical interface sequence
IDEVNRTF

SEQ ID NO: 17884 - protein, 8 aa, Artificial
  helical interface sequence
IDEVNRTF

SEQ ID NO: 17885 - protein, 19 aa, Artificial
  helical interface sequence
SKELDLLRINHLNYVLKKR

SEQ ID NO: 17886 - protein, 8 aa, Artificial
  helical interface sequence
QVAMAAPI

SEQ ID NO: 17887 - protein, 8 aa, Artificial
  helical interface sequence
KEYIEKFK

SEQ ID NO: 17888 - protein, 6 aa, Artificial
  helical interface sequence
PVIAKN

SEQ ID NO: 17889 - protein, 12 aa, Artificial
  helical interface sequence
ASGPVKAIMDEV

SEQ ID NO: 17890 - protein, 6 aa, Artificial
  helical interface sequence
PVIAKN

SEQ ID NO: 17891 - protein, 8 aa, Artificial
  helical interface sequence
REELVSQG

SEQ ID NO: 17892 - protein, 6 aa, Artificial
  helical interface sequence
YDQGAN

SEQ ID NO: 17893 - protein, 11 aa, Artificial
  helical interface sequence
LDEVKIALVNA

SEQ ID NO: 17894 - protein, 7 aa, Artificial
  helical interface sequence
DEQLKSG

SEQ ID NO: 17895 - protein, 6 aa, Artificial
  helical interface sequence
DEQLKS

SEQ ID NO: 17896 - protein, 15 aa, Artificial
  helical interface sequence
LSKQAVAYRQMSLLL

SEQ ID NO: 17897 - protein, 7 aa, Artificial
  helical interface sequence
LAQYREV

SEQ ID NO: 17898 - protein, 5 aa, Artificial
  helical interface sequence
EVFTG

SEQ ID NO: 17899 - protein, 11 aa, Artificial
  helical interface sequence
IFRFTQAGSEV

SEQ ID NO: 17900 - protein, 28 aa, Artificial
  helical interface sequence
SEHYDVARGVQKILQDYKSLQDIIAILG

SEQ ID NO: 17901 - protein, 51 aa, Artificial; identical to SEQ ID NO: 4146
  helical interface sequence

SEQ ID NO: 17902 - protein, 15 aa, Artificial
  helical interface sequence
DLDRFWLETLLCLIG

SEQ ID NO: 17903 - protein, 11 aa, Artificial
  helical interface sequence
AAELRHVMTNL

SEQ ID NO: 17904 - protein, 12 aa, Artificial
  helical interface sequence
RWFLDKLVDEIG

SEQ ID NO: 17905 - protein, 10 aa, Artificial
  helical interface sequence
MYKRVNKIIP

SEQ ID NO: 17906 - protein, 15 aa, Artificial
  helical interface sequence
KDVFLGMFLYEYARR

SEQ ID NO: 17907 - protein, 8 aa, Artificial
  helical interface sequence
WAREVTKF

SEQ ID NO: 17908 - protein, 10 aa, Artificial
  helical interface sequence
VNLYQNYSEL

SEQ ID NO: 17909 - protein, 6 aa, Artificial
  helical interface sequence
SEQLTS

SEQ ID NO: 17910 - protein, 15 aa, Artificial
  helical interface sequence
VSVRQRAVDLLYAMC

SEQ ID NO: 17911 - protein, 8 aa, Artificial
  helical interface sequence
ENVAQCSG

SEQ ID NO: 17912 - protein, 11 aa, Artificial
  helical interface sequence
VAEQLRAYLEG

SEQ ID NO: 17913 - protein, 24 aa, Artificial
  helical interface sequence
VAEQLRAYLEGTCVEWLRRYLENG

SEQ ID NO: 17914 - protein, 8 aa, Artificial
  helical interface sequence
LREVNRTF

SEQ ID NO: 17915 - protein, 16 aa, Artificial
  helical interface sequence
IDTARIIFNQVMEKEF

SEQ ID NO: 17916 - protein, 5 aa, Artificial
  helical interface sequence
DTCMA

SEQ ID NO: 17917 - protein, 7 aa, Artificial
  helical interface sequence
KDQADRC

SEQ ID NO: 17918 - protein, 14 aa, Artificial
  helical interface sequence
KDEVERKMKSLLNK

SEQ ID NO: 17919 - protein, 16 aa, Artificial
  helical interface sequence
MEEYAREVFPIEEEAN

SEQ ID NO: 17920 - protein, 9 aa, Artificial
  helical interface sequence
WIDVYTRAT

SEQ ID NO: 17921 - protein, 15 aa, Artificial
  helical interface sequence
LKSTLRVLYNLFTKY

SEQ ID NO: 17922 - protein, 16 aa, Artificial
  helical interface sequence
TQQSLELAFLVAEMLR

SEQ ID NO: 17923 - protein, 13 aa, Artificial
  helical interface sequence
RVLNAACQRLARA

SEQ ID NO: 17924 - protein, 6 aa, Artificial
  helical interface sequence
ENMRRP

SEQ ID NO: 17925 - protein, 13 aa, Artificial
  helical interface sequence
YAFKLLIQELMSM

SEQ ID NO: 17926 - protein, 5 aa, Artificial
  helical interface sequence
IKGLT

SEQ ID NO: 17927 - protein, 5 aa, Artificial
  helical interface sequence
PDEVR

SEQ ID NO: 17928 - protein, 11 aa, Artificial
  helical interface sequence
PTELFFHAAGG

SEQ ID NO: 17929 - protein, 5 aa, Artificial
  helical interface sequence
VADKI

SEQ ID NO: 17930 - protein, 13 aa, Artificial
  helical interface sequence
YAFKLLIQELMSM

SEQ ID NO: 17931 - protein, 6 aa, Artificial
  helical interface sequence
RRMLLS

SEQ ID NO: 17932 - protein, 11 aa, Artificial
  helical interface sequence
DEILAHRLALI

SEQ ID NO: 17933 - protein, 8 aa, Artificial
  helical interface sequence
LPRLIEIV

SEQ ID NO: 17934 - protein, 5 aa, Artificial
  helical interface sequence
DLAVR

SEQ ID NO: 17935 - protein, 15 aa, Artificial
  helical interface sequence
TSTGKKVMASASSSS

SEQ ID NO: 17936 - protein, 6 aa, Artificial
  helical interface sequence
NSILAG

SEQ ID NO: 17937 - protein, 11 aa, Artificial
  helical interface sequence
DATWLDYLNRF

SEQ ID NO: 17938 - protein, 17 aa, Artificial
  helical interface sequence
DECRARAGALDAVGGSL

SEQ ID NO: 17939 - protein, 5 aa, Artificial
  helical interface sequence
YQEII

SEQ ID NO: 17940 - protein, 11 aa, Artificial
  helical interface sequence
LNEAKRFMQTV

SEQ ID NO: 17941 - protein, 11 aa, Artificial
  helical interface sequence
LNEAKRFMQTV

SEQ ID NO: 17942 - protein, 22 aa, Artificial
  helical interface sequence
APDARVLSNYLRQQCNYSSLVF

SEQ ID NO: 17943 - protein, 22 aa, Artificial
  helical interface sequence
TADARSMIEHARTAAVTHNLYY

SEQ ID NO: 17944 - protein, 20 aa, Artificial
  helical interface sequence
ISDMQHIERLLKDLVTENAY

SEQ ID NO: 17945 - protein, 22 aa, Artificial
  helical interface sequence
AADTQAIADIVQYHLELYTSQY

SEQ ID NO: 17946 - protein, 17 aa, Artificial
  helical interface sequence
PQAVSSFVRQELAKSIR

SEQ ID NO: 17947 - protein, 5 aa, Artificial
  helical interface sequence
YKRIY

SEQ ID NO: 17948 - protein, 20 aa, Artificial
  helical interface sequence
ISDMQHIERLLKDLVTENAY

SEQ ID NO: 17949 - protein, 18 aa, Artificial
  helical interface sequence
PSYIFEYLATVMYQRRSK

SEQ ID NO: 17950 - protein, 19 aa, Artificial
  helical interface sequence
KEEAIKLASDAIQAGIWND

SEQ ID NO: 17951 - protein, 14 aa, Artificial
  helical interface sequence
FGAHMANPLLRKVV

SEQ ID NO: 17952 - protein, 19 aa, Artificial
  helical interface sequence
VEDALYLGKRSILAAAHRD

SEQ ID NO: 17953 - protein, 24 aa, Artificial
  helical interface sequence
IGLLIVVGVALDTLRQVESQLMLR

SEQ ID NO: 17954 - protein, 17 aa, Artificial
  helical interface sequence
FGMLKAKAQALVQYLEE

SEQ ID NO: 17955 - protein, 12 aa, Artificial
  helical interface sequence
KNELKQALSGFG

SEQ ID NO: 17956 - protein, 31 aa, Artificial; identical to SEQ ID NO: 4387
  helical interface sequence

SEQ ID NO: 17957 - protein, 13 aa, Artificial
  helical interface sequence
QQDAQQMIIYAFA

SEQ ID NO: 17958 - protein, 14 aa, Artificial
  helical interface sequence
RRKVDWLTEKMHAR

SEQ ID NO: 17959 - protein, 21 aa, Artificial
  helical interface sequence
FPYSLIIFLYDEMRRFIIRRS

SEQ ID NO: 17960 - protein, 12 aa, Artificial
  helical interface sequence
IVAAHGYFGRLI

SEQ ID NO: 17961 - protein, 8 aa, Artificial
  helical interface sequence
NLGMEVMH

SEQ ID NO: 17962 - protein, 18 aa, Artificial
  helical interface sequence
MGVAGVLGGALLCAIHGA

SEQ ID NO: 17963 - protein, 11 aa, Artificial
  helical interface sequence
GLWIALVLVVG

SEQ ID NO: 17964 - protein, 16 aa, Artificial
  helical interface sequence
SLYLGLLLILVLALLF

SEQ ID NO: 17965 - protein, 9 aa, Artificial
  helical interface sequence
LWIVATVAG

SEQ ID NO: 17966 - protein, 12 aa, Artificial
  helical interface sequence
KANREKMTQIMF

SEQ ID NO: 17967 - protein, 6 aa, Artificial
  helical interface sequence
VDIRKD

SEQ ID NO: 17968 - protein, 10 aa, Artificial
  helical interface sequence
IDIRKDLYAN

SEQ ID NO: 17969 - protein, 15 aa, Artificial
  helical interface sequence
GRDLTDYLMKILTER

SEQ ID NO: 17970 - protein, 9 aa, Artificial
  helical interface sequence
GMIQALGGF

SEQ ID NO: 17971 - protein, 10 aa, Artificial
  helical interface sequence
PEHAERAAHV

SEQ ID NO: 17972 - protein, 28 aa, Artificial
  helical interface sequence
LRETEATNAILMEQIKLLKSEIRRLERN

SEQ ID NO: 17973 - protein, 12 aa, Artificial
  helical interface sequence
VRNWISQLQMHA

SEQ ID NO: 17974 - protein, 15 aa, Artificial
  helical interface sequence
HASDVLLNLNRLRSR

SEQ ID NO: 17975 - protein, 7 aa, Artificial
  helical interface sequence
GLFYSIF

SEQ ID NO: 17976 - protein, 7 aa, Artificial
  helical interface sequence
GLFYSIF

SEQ ID NO: 17977 - protein, 7 aa, Artificial
  helical interface sequence
SEQLTSG

SEQ ID NO: 17978 - protein, 14 aa, Artificial
  helical interface sequence
KLGDGLFRNIITEI

SEQ ID NO: 17979 - protein, 15 aa, Artificial
  helical interface sequence
SMYGTILGNIGAALI

SEQ ID NO: 17980 - protein, 12 aa, Artificial
  helical interface sequence
IDTCRSMVAVMD

SEQ ID NO: 17981 - protein, 18 aa, Artificial
  helical interface sequence
ACQLRTIYICQFLTRIAA

SEQ ID NO: 17982 - protein, 60 aa, Artificial; identical to SEQ ID NO: 2060
  helical interface sequence

SEQ ID NO: 17983 - protein, 15 aa, Artificial
  helical interface sequence
KEVAKKMVEYIIVNS

SEQ ID NO: 17984 - protein, 15 aa, Artificial
  helical interface sequence
STQLCQAAVHALSSL

SEQ ID NO: 17985 - protein, 6 aa, Artificial
  helical interface sequence
LAYDVF

SEQ ID NO: 17986 - protein, 29 aa, Artificial
  helical interface sequence
SKAMSIMNSFVNDVFERIAGEASRLAHYN

SEQ ID NO: 17987 - protein, 11 aa, Artificial
  helical interface sequence
HIPCTEFVNLC

SEQ ID NO: 17988 - protein, 8 aa, Artificial
  helical interface sequence
KAEIANKQ

SEQ ID NO: 17989 - protein, 21 aa, Artificial
  helical interface sequence
PEILERTRAELDTVCRHNYEG

SEQ ID NO: 17990 - protein, 8 aa, Artificial
  helical interface sequence
RPDAEYWN

SEQ ID NO: 17991 - protein, 15 aa, Artificial
  helical interface sequence
EGQRGAAEAAAALAA

SEQ ID NO: 17992 - protein, 15 aa, Artificial
  helical interface sequence
EGQRGAAEAAAALAA

SEQ ID NO: 17993 - protein, 10 aa, Artificial
  helical interface sequence
LQPCFEDLGN

SEQ ID NO: 17994 - protein, 8 aa, Artificial
  helical interface sequence
ERKKWIHC

SEQ ID NO: 17995 - protein, 23 aa, Artificial
  helical interface sequence
VADARVLVDFARISAQQEKVTYG

SEQ ID NO: 17996 - protein, 23 aa, Artificial
  helical interface sequence
VADARVLVDFARISAQQEKVTYG

SEQ ID NO: 17997 - protein, 8 aa, Artificial
  helical interface sequence
AMDLVNGA

SEQ ID NO: 17998 - protein, 15 aa, Artificial
  helical interface sequence
MPLLIKDMTFTHEGN

SEQ ID NO: 17999 - protein, 11 aa, Artificial
  helical interface sequence
VAVGKLLDYLN

SEQ ID NO: 18000 - protein, 15 aa, Artificial
  helical interface sequence
ELVNKISENCFEKCL

SEQ ID NO: 18001 - protein, 15 aa, Artificial
  helical interface sequence
GGCAEAVSRVLNKLG

SEQ ID NO: 18002 - protein, 18 aa, Artificial
  helical interface sequence
IGKVCRTLLAKSVFNSLY

SEQ ID NO: 18003 - protein, 10 aa, Artificial
  helical interface sequence
TNETTKSIER

SEQ ID NO: 18004 - protein, 8 aa, Artificial
  helical interface sequence
SWLHEINS

SEQ ID NO: 18005 - protein, 5 aa, Artificial
  helical interface sequence
AASND

SEQ ID NO: 18006 - protein, 5 aa, Artificial
  helical interface sequence
AASND

SEQ ID NO: 18007 - protein, 13 aa, Artificial
  helical interface sequence
ILNRKAIDFLLQR

SEQ ID NO: 18008 - protein, 11 aa, Artificial
  helical interface sequence
SLKAMGEEIWK

SEQ ID NO: 18009 - protein, 23 aa, Artificial
  helical interface sequence
QNEEDAKLLYGMIFSLRSITQKL

SEQ ID NO: 18010 - protein, 7 aa, Artificial
  helical interface sequence
FWSEMLG

SEQ ID NO: 18011 - protein, 6 aa, Artificial
  helical interface sequence
PWEVTD

SEQ ID NO: 18012 - protein, 12 aa, Artificial
  helical interface sequence
AFSSVAHTCRNV

SEQ ID NO: 18013 - protein, 9 aa, Artificial
  helical interface sequence
HTLVEWAWG

SEQ ID NO: 18014 - protein, 23 aa, Artificial
  helical interface sequence
TEELFDFLHARDHCVAHKLFNKL

SEQ ID NO: 18015 - protein, 6 aa, Artificial
  helical interface sequence
YAQTLQ

SEQ ID NO: 18016 - protein, 9 aa, Artificial
  helical interface sequence
HTLVEWAWG

SEQ ID NO: 18017 - protein, 32 aa, Artificial; identical to SEQ ID NO: 2343
  helical interface sequence

SEQ ID NO: 18018 - protein, 11 aa, Artificial
  helical interface sequence
KAGREELERVN

SEQ ID NO: 18019 - protein, 14 aa, Artificial
  helical interface sequence
QMSHWGATVITNLF

SEQ ID NO: 18020 - protein, 33 aa, Artificial; identical to SEQ ID NO: 9213
  helical interface sequence

SEQ ID NO: 18021 - protein, 11 aa, Artificial
  helical interface sequence
QLEDLREHFKN

SEQ ID NO: 18022 - protein, 7 aa, Artificial
  helical interface sequence
DEQLKSG

SEQ ID NO: 18023 - protein, 15 aa, Artificial
  helical interface sequence
RSKYGMLARLAVEAG

SEQ ID NO: 18024 - protein, 10 aa, Artificial
  helical interface sequence
KLFLEMLEAM

SEQ ID NO: 18025 - protein, 12 aa, Artificial
  helical interface sequence
VKKNLEFGMRMK

SEQ ID NO: 18026 - protein, 14 aa, Artificial
  helical interface sequence
DGIIEGIADYGNSI

SEQ ID NO: 18027 - protein, 8 aa, Artificial
  helical interface sequence
KPEAERIK

SEQ ID NO: 18028 - protein, 9 aa, Artificial
  helical interface sequence
LVDYLRSRG

SEQ ID NO: 18029 - protein, 34 aa, Artificial
  helical interface sequence
PWQRLLLRFKILRSLQAFVAVAARVFAHGAATLS

SEQ ID NO: 18030 - protein, 15 aa, Artificial
  helical interface sequence
VKEVMHYLGQYIMMK

SEQ ID NO: 18031 - protein, 12 aa, Artificial
  helical interface sequence
LGCELLKNLALS

SEQ ID NO: 18032 - protein, 18 aa, Artificial
  helical interface sequence
PYITNRTFMLAKEASLAD

SEQ ID NO: 18033 - protein, 15 aa, Artificial
  helical interface sequence
WAAIAAKHFFDDIIT

SEQ ID NO: 18034 - protein, 8 aa, Artificial
  helical interface sequence
LEGALKYM

SEQ ID NO: 18035 - protein, 14 aa, Artificial
  helical interface sequence
WGRCWDVITENVLN

SEQ ID NO: 18036 - protein, 19 aa, Artificial
  helical interface sequence
PVNFKLLGHCFLVVVAVHF

SEQ ID NO: 18037 - protein, 19 aa, Artificial
  helical interface sequence
PVNFKLLGHCFLVVVAVHF

SEQ ID NO: 18038 - protein, 13 aa, Artificial
  helical interface sequence
GGQKQRVAIARAL

SEQ ID NO: 18039 - protein, 17 aa, Artificial
  helical interface sequence
VSLLYHLINALKALHLF

SEQ ID NO: 18040 - protein, 28 aa, Artificial
  helical interface sequence
REYQMEGFAMFEHMIESIEDEVAKFVMK

SEQ ID NO: 18041 - protein, 9 aa, Artificial
  helical interface sequence
MRDNWRSEL

SEQ ID NO: 18042 - protein, 13 aa, Artificial
  helical interface sequence
PSIKALILQIDAK

SEQ ID NO: 18043 - protein, 11 aa, Artificial
  helical interface sequence
FTMFLTIFGDR

SEQ ID NO: 18044 - protein, 5 aa, Artificial
  helical interface sequence
FQLID

SEQ ID NO: 18045 - protein, 10 aa, Artificial
  helical interface sequence
PEVEQQLIEA

SEQ ID NO: 18046 - protein, 13 aa, Artificial
  helical interface sequence
FNLKEQYEIYKEK

SEQ ID NO: 18047 - protein, 13 aa, Artificial
  helical interface sequence
FNLKEQYEIYKEK

SEQ ID NO: 18048 - protein, 12 aa, Artificial
  helical interface sequence
EEEIREAFRVFD

SEQ ID NO: 18049 - protein, 10 aa, Artificial
  helical interface sequence
SKVAEHFKQD

SEQ ID NO: 18050 - protein, 16 aa, Artificial
  helical interface sequence
EDDVFYAISALAASLG

SEQ ID NO: 18051 - protein, 11 aa, Artificial
  helical interface sequence
KRWIQKVIDQF

SEQ ID NO: 18052 - protein, 14 aa, Artificial
  helical interface sequence
KGALAVILVLTLTI

SEQ ID NO: 18053 - protein, 15 aa, Artificial
  helical interface sequence
LAQQAHSNRKLMEII

SEQ ID NO: 18054 - protein, 17 aa, Artificial
  helical interface sequence
HLVKEIDMLLKEYLLSG

SEQ ID NO: 18055 - protein, 5 aa, Artificial
  helical interface sequence
PRLAH

SEQ ID NO: 18056 - protein, 11 aa, Artificial
  helical interface sequence
ENVLSSDILDL

SEQ ID NO: 18057 - protein, 22 aa, Artificial
  helical interface sequence
PAIDIGQVEGAFVQGLGLFTLE

SEQ ID NO: 18058 - protein, 7 aa, Artificial
  helical interface sequence
AAMQASG

SEQ ID NO: 18059 - protein, 25 aa, Artificial
  helical interface sequence
VEELKEIDVEVRKEIEDAAQFATAD

SEQ ID NO: 18060 - protein, 6 aa, Artificial
  helical interface sequence
LWKKYG

SEQ ID NO: 18061 - protein, 12 aa, Artificial
  helical interface sequence
VKDIIFAIKKTL

SEQ ID NO: 18062 - protein, 5 aa, Artificial
  helical interface sequence
QNRSG

SEQ ID NO: 18063 - protein, 9 aa, Artificial
  helical interface sequence
GALIKLVES

SEQ ID NO: 18064 - protein, 9 aa, Artificial
  helical interface sequence
NSFAFELCS

SEQ ID NO: 18065 - protein, 18 aa, Artificial
  helical interface sequence
RFHKLQNVQIALDYLRHR

SEQ ID NO: 18066 - protein, 16 aa, Artificial
  helical interface sequence
GHAKRLAPEYEAAATR

SEQ ID NO: 18067 - protein, 15 aa, Artificial
  helical interface sequence
IETIVLMAVHCMNFK

SEQ ID NO: 18068 - protein, 10 aa, Artificial
  helical interface sequence
TEMITTLKKI

SEQ ID NO: 18069 - protein, 9 aa, Artificial
  helical interface sequence
PLLSEIWDV

SEQ ID NO: 18070 - protein, 5 aa, Artificial
  helical interface sequence
DGRLA

SEQ ID NO: 18071 - protein, 11 aa, Artificial
  helical interface sequence
PFQNFFKITLP

SEQ ID NO: 18072 - protein, 16 aa, Artificial
  helical interface sequence
SLVALYALFDRLGEYI

SEQ ID NO: 18073 - protein, 16 aa, Artificial
  helical interface sequence
SLVALYALFDRLGEYI

SEQ ID NO: 18074 - protein, 21 aa, Artificial
  helical interface sequence
TKEFADNLDSDFKVRQYLTKE

SEQ ID NO: 18075 - protein, 6 aa, Artificial
  helical interface sequence
KGAKKR

SEQ ID NO: 18076 - protein, 15 aa, Artificial
  helical interface sequence
LSKQAVAYRQLSLLL

SEQ ID NO: 18077 - protein, 16 aa, Artificial
  helical interface sequence
IFRFTQAGSEVSALLG

SEQ ID NO: 18078 - protein, 12 aa, Artificial
  helical interface sequence
GNDLYREMKETG

SEQ ID NO: 18079 - protein, 15 aa, Artificial
  helical interface sequence
LSKQAVAYRQLSLLL

SEQ ID NO: 18080 - protein, 5 aa, Artificial
  helical interface sequence
PGARA

SEQ ID NO: 18081 - protein, 10 aa, Artificial
  helical interface sequence
PAPATTFAHL

SEQ ID NO: 18082 - protein, 15 aa, Artificial
  helical interface sequence
LDELFLKLFTPILKT

SEQ ID NO: 18083 - protein, 15 aa, Artificial
  helical interface sequence
AARLADSLETALKLA

SEQ ID NO: 18084 - protein, 19 aa, Artificial
  helical interface sequence
PEVHASLDKFLCAVGAVLT

SEQ ID NO: 18085 - protein, 13 aa, Artificial
  helical interface sequence
QLKSQIQQYLVES

SEQ ID NO: 18086 - protein, 15 aa, Artificial
  helical interface sequence
TAQLKSQIQQYLVES

SEQ ID NO: 18087 - protein, 11 aa, Artificial
  helical interface sequence
EAELQDMINEV

SEQ ID NO: 18088 - protein, 12 aa, Artificial
  helical interface sequence
FPEFLTMMARKM

SEQ ID NO: 18089 - protein, 16 aa, Artificial
  helical interface sequence
AEREAELDDLKTELLN

SEQ ID NO: 18090 - protein, 13 aa, Artificial
  helical interface sequence
LKTMKSVVEKMKN

SEQ ID NO: 18091 - protein, 15 aa, Artificial
  helical interface sequence
RIPQILTPILDKYTH

SEQ ID NO: 18092 - protein, 22 aa, Artificial
  helical interface sequence
KESTQKAIDGVTNKVNSIIDKM

SEQ ID NO: 18093 - protein, 16 aa, Artificial
  helical interface sequence
FANMQFLGLAADAAEA

SEQ ID NO: 18094 - protein, 14 aa, Artificial
  helical interface sequence
QERPIRNSVDELNN

SEQ ID NO: 18095 - protein, 19 aa, Artificial
  helical interface sequence
TCGIADFLSTYQTKVDKDL

SEQ ID NO: 18096 - protein, 8 aa, Artificial
  helical interface sequence
ASILTHDS

SEQ ID NO: 18097 - protein, 11 aa, Artificial
  helical interface sequence
ERPIRNSVDEL

SEQ ID NO: 18098 - protein, 44 aa, Artificial; identical to SEQ ID NO: 5675
  helical interface sequence

SEQ ID NO: 18099 - protein, 14 aa, Artificial
  helical interface sequence
TCGIADFLSTYQTK

SEQ ID NO: 18100 - protein, 21 aa, Artificial
  helical interface sequence
VVNEYSSELEKHQLYIDETVN

SEQ ID NO: 18101 - protein, 14 aa, Artificial
  helical interface sequence
IMKYEASILTHDSS

SEQ ID NO: 18102 - protein, 6 aa, Artificial
  helical interface sequence
SEELQA

SEQ ID NO: 18103 - protein, 14 aa, Artificial
  helical interface sequence
RNVSLKCLTEIAGV

SEQ ID NO: 18104 - protein, 22 aa, Artificial
  helical interface sequence
TEIFKICLEYWNHLAAELYRES

SEQ ID NO: 18105 - protein, 19 aa, Artificial
  helical interface sequence
PLLLQESQDAVRQVAAAQG

SEQ ID NO: 18106 - protein, 15 aa, Artificial
  helical interface sequence
TLQRELLLLVNLKRQ

SEQ ID NO: 18107 - protein, 14 aa, Artificial
  helical interface sequence
SKRALHILQQLRLE

SEQ ID NO: 18108 - protein, 25 aa, Artificial
  helical interface sequence
PVILLRTLQRELLLLVNLKRQSAHT

SEQ ID NO: 18109 - protein, 15 aa, Artificial
  helical interface sequence
RRMGVEMTLLRALAF

SEQ ID NO: 18110 - protein, 11 aa, Artificial
  helical interface sequence
NTAANLLLTTI

SEQ ID NO: 18111 - protein, 11 aa, Artificial
  helical interface sequence
NTAANLLLTTI

SEQ ID NO: 18112 - protein, 10 aa, Artificial
  helical interface sequence
KEWIEEIKKN

SEQ ID NO: 18113 - protein, 11 aa, Artificial
  helical interface sequence
IIAPSEASSNL

SEQ ID NO: 18114 - protein, 11 aa, Artificial
  helical interface sequence
IIAPSEASSNL

SEQ ID NO: 18115 - protein, 6 aa, Artificial
  helical interface sequence
WIQYKE

SEQ ID NO: 18116 - protein, 6 aa, Artificial
  helical interface sequence
SEELQA

SEQ ID NO: 18117 - protein, 6 aa, Artificial
  helical interface sequence
LYKMRT

SEQ ID NO: 18118 - protein, 6 aa, Artificial
  helical interface sequence
LYKMRT

SEQ ID NO: 18119 - protein, 23 aa, Artificial
  helical interface sequence
LKEAQSINKSLSALGDVIGALSS

SEQ ID NO: 18120 - protein, 6 aa, Artificial
  helical interface sequence
SEELQA

SEQ ID NO: 18121 - protein, 11 aa, Artificial
  helical interface sequence
ADQLADESLES

SEQ ID NO: 18122 - protein, 7 aa, Artificial
  helical interface sequence
MARENEM

SEQ ID NO: 18123 - protein, 29 aa, Artificial
  helical interface sequence
PEYWDGETRKVKAHSQTHRVDLGTLRGYY

SEQ ID NO: 18124 - protein, 5 aa, Artificial
  helical interface sequence
MPMHG

SEQ ID NO: 18125 - protein, 10 aa, Artificial
  helical interface sequence
PHTHLVHQAN

SEQ ID NO: 18126 - protein, 7 aa, Artificial
  helical interface sequence
HVATYFD

SEQ ID NO: 18127 - protein, 6 aa, Artificial
  helical interface sequence
VLARAA

SEQ ID NO: 18128 - protein, 9 aa, Artificial
  helical interface sequence
NVKQMVMAG

SEQ ID NO: 18129 - protein, 17 aa, Artificial
  helical interface sequence
VAHLIECLLSKVAALSG

SEQ ID NO: 18130 - protein, 10 aa, Artificial
  helical interface sequence
FINIAQMSAC

SEQ ID NO: 18131 - protein, 8 aa, Artificial
  helical interface sequence
ASFLKERL

SEQ ID NO: 18132 - protein, 22 aa, Artificial
  helical interface sequence
RSMVEGQIEGGVTMGQGFVLME

SEQ ID NO: 18133 - protein, 21 aa, Artificial
  helical interface sequence
EEFQKLCDDFAQFSYTLTEFG

SEQ ID NO: 18134 - protein, 21 aa, Artificial
  helical interface sequence
NAPGAVANRVALEACVKARNE

SEQ ID NO: 18135 - protein, 7 aa, Artificial
  helical interface sequence
TDGLIAL

SEQ ID NO: 18136 - protein, 13 aa, Artificial
  helical interface sequence
MAPALRHLYKELM

SEQ ID NO: 18137 - protein, 6 aa, Artificial
  helical interface sequence
SEQLTS

SEQ ID NO: 18138 - protein, 11 aa, Artificial
  helical interface sequence
DRYCESIMRRR

SEQ ID NO: 18139 - protein, 5 aa, Artificial
  helical interface sequence
TTYYY

SEQ ID NO: 18140 - protein, 11 aa, Artificial
  helical interface sequence
SCTREETSRNM

SEQ ID NO: 18141 - protein, 9 aa, Artificial
  helical interface sequence
QDELESLAG

SEQ ID NO: 18142 - protein, 9 aa, Artificial
  helical interface sequence
QDELESLAG

SEQ ID NO: 18143 - protein, 14 aa, Artificial
  helical interface sequence
GELRVRAATTISAN

SEQ ID NO: 18144 - protein, 13 aa, Artificial
  helical interface sequence
TVALREIRRYQKS

SEQ ID NO: 18145 - protein, 29 aa, Artificial
  helical interface sequence
SSAVMALQEASEAYLVALFEDTNLCAIHA

SEQ ID NO: 18146 - protein, 6 aa, Artificial
  helical interface sequence
RSSRAG

SEQ ID NO: 18147 - protein, 11 aa, Artificial
  helical interface sequence
LPVLEAVAKAG

SEQ ID NO: 18148 - protein, 25 aa, Artificial
  helical interface sequence
TPMLWAFGFLFLFTVGGVTGVVLSQ

SEQ ID NO: 18149 - protein, 23 aa, Artificial
  helical interface sequence
PEAQAKVDVFREDLCTKTENLLG

SEQ ID NO: 18150 - protein, 6 aa, Artificial
  helical interface sequence
FEKLKK

SEQ ID NO: 18151 - protein, 6 aa, Artificial
  helical interface sequence
SEQLTS

SEQ ID NO: 18152 - protein, 11 aa, Artificial
  helical interface sequence
PISVARAVMEK

SEQ ID NO: 18153 - protein, 9 aa, Artificial
  helical interface sequence
NADCDAVYG

SEQ ID NO: 18154 - protein, 13 aa, Artificial
  helical interface sequence
PGELDRIKSFVSS

SEQ ID NO: 18155 - protein, 25 aa, Artificial
  helical interface sequence
TRRYAACIRDLDYYLRYATYAMLAG

SEQ ID NO: 18156 - protein, 8 aa, Artificial
  helical interface sequence
FQFAAGSM

SEQ ID NO: 18157 - protein, 16 aa, Artificial
  helical interface sequence
HEAVVKEAGDACFAKY

SEQ ID NO: 18158 - protein, 16 aa, Artificial
  helical interface sequence
HEAVVKEAGDACFAKY

SEQ ID NO: 18159 - protein, 6 aa, Artificial
  helical interface sequence
YNRIRS

SEQ ID NO: 18160 - protein, 35 aa, Artificial; identical to SEQ ID NO: 7521
  helical interface sequence

SEQ ID NO: 18161 - protein, 10 aa, Artificial
  helical interface sequence
PLTTVREQCE

SEQ ID NO: 18162 - protein, 13 aa, Artificial
  helical interface sequence
YSRLRKMLYLIYV

SEQ ID NO: 18163 - protein, 13 aa, Artificial
  helical interface sequence
PMEVMLRAVFMQQ

SEQ ID NO: 18164 - protein, 8 aa, Artificial
  helical interface sequence
SVAYGASE

SEQ ID NO: 18165 - protein, 12 aa, Artificial
  helical interface sequence
LTATRYSIGALG

SEQ ID NO: 18166 - protein, 13 aa, Artificial
  helical interface sequence
AGERIVDIIATDI

SEQ ID NO: 18167 - protein, 10 aa, Artificial
  helical interface sequence
TAIALELLKQ

SEQ ID NO: 18168 - protein, 10 aa, Artificial
  helical interface sequence
LDTLKVLVEH

SEQ ID NO: 18169 - protein, 10 aa, Artificial
  helical interface sequence
TAIALELLKQ

SEQ ID NO: 18170 - protein, 10 aa, Artificial
  helical interface sequence
LDTLKVLVEH

SEQ ID NO: 18171 - protein, 9 aa, Artificial
  helical interface sequence
EEEVEQLVA

SEQ ID NO: 18172 - protein, 9 aa, Artificial
  helical interface sequence
EEEVEQLVA

SEQ ID NO: 18173 - protein, 23 aa, Artificial
  helical interface sequence
AQGALANIAVDKANLEIMTKRSN

SEQ ID NO: 18174 - protein, 20 aa, Artificial
  helical interface sequence
WRDRFLFVMDAVNKASAATG

SEQ ID NO: 18175 - protein, 34 aa, Artificial
  helical interface sequence
IPLLRTQFFIVMGLVDAIPMIAVGLGLYVMFAVA

SEQ ID NO: 18176 - protein, 11 aa, Artificial
  helical interface sequence
GEEVEELLENQ

SEQ ID NO: 18177 - protein, 13 aa, Artificial
  helical interface sequence
FQMVIDDIFAVGK

SEQ ID NO: 18178 - protein, 13 aa, Artificial
  helical interface sequence
FQMVIDDIFAVGK

SEQ ID NO: 18179 - protein, 13 aa, Artificial
  helical interface sequence
VTALVNWVQQTLA

SEQ ID NO: 18180 - protein, 10 aa, Artificial
  helical interface sequence
FPEFLTMMAR

SEQ ID NO: 18181 - protein, 13 aa, Artificial
  helical interface sequence
NPILWRARQYINS

SEQ ID NO: 18182 - protein, 14 aa, Artificial
  helical interface sequence
FRKLFRVYSNFLRG

SEQ ID NO: 18183 - protein, 12 aa, Artificial
  helical interface sequence
TGAKLLYESLLE

SEQ ID NO: 18184 - protein, 8 aa, Artificial
  helical interface sequence
KKVILQDK

SEQ ID NO: 18185 - protein, 8 aa, Artificial
  helical interface sequence
VKELLRRK

SEQ ID NO: 18186 - protein, 16 aa, Artificial
  helical interface sequence
IESVMAACVYAACRLL

SEQ ID NO: 18187 - protein, 6 aa, Artificial
  helical interface sequence
LMEIAE

SEQ ID NO: 18188 - protein, 5 aa, Artificial
  helical interface sequence
SEQLT

SEQ ID NO: 18189 - protein, 11 aa, Artificial
  helical interface sequence
DEDVDEIIKLT

SEQ ID NO: 18190 - protein, 11 aa, Artificial
  helical interface sequence
DEDVDEIIKLT

SEQ ID NO: 18191 - protein, 18 aa, Artificial
  helical interface sequence
QDEIDDLKDVFELFDFWD

SEQ ID NO: 18192 - protein, 11 aa, Artificial
  helical interface sequence
VAFVAVEGNRL

SEQ ID NO: 18193 - protein, 9 aa, Artificial
  helical interface sequence
DVAARLRAA

SEQ ID NO: 18194 - protein, 9 aa, Artificial
  helical interface sequence
DVAARLRAA

SEQ ID NO: 18195 - protein, 6 aa, Artificial
  helical interface sequence
IQEIQE

SEQ ID NO: 18196 - protein, 21 aa, Artificial
  helical interface sequence
DVYKLLVQLKVVEDGILKLRN

SEQ ID NO: 18197 - protein, 11 aa, Artificial
  helical interface sequence
LLGCIITSLTG

SEQ ID NO: 18198 - protein, 15 aa, Artificial
  helical interface sequence
KLKFDKLYKMLTEIY

SEQ ID NO: 18199 - protein, 5 aa, Artificial
  helical interface sequence
WVKRG

SEQ ID NO: 18200 - protein, 12 aa, Artificial
  helical interface sequence
NVINTFTQTARS

SEQ ID NO: 18201 - protein, 24 aa, Artificial
  helical interface sequence
MDLWNAYAAAGLVAAVMVNQGAAR

SEQ ID NO: 18202 - protein, 18 aa, Artificial
  helical interface sequence
PYSGTLQAGMAVVHAIID

SEQ ID NO: 18203 - protein, 24 aa, Artificial
  helical interface sequence
MDLWNAYAAAGLVAAVMVNQGAAR

SEQ ID NO: 18204 - protein, 19 aa, Artificial
  helical interface sequence
ANAGLSGWYLSMYLHKEAW

SEQ ID NO: 18205 - protein, 19 aa, Artificial
  helical interface sequence
MSATTVGAAAVTQTIMDMF

SEQ ID NO: 18206 - protein, 19 aa, Artificial
  helical interface sequence
ANAGLSGWYLSMYLHKEAW

SEQ ID NO: 18207 - protein, 19 aa, Artificial
  helical interface sequence
ANAGLSGWYLSMYLHKEAW

SEQ ID NO: 18208 - protein, 20 aa, Artificial
  helical interface sequence
AQNVSSTLLYFNDILEKETG

SEQ ID NO: 18209 - protein, 13 aa, Artificial
  helical interface sequence
TAAQITQRKWEAA

SEQ ID NO: 18210 - protein, 19 aa, Artificial
  helical interface sequence
LKSTQAAIDQINGKLNRVI

SEQ ID NO: 18211 - protein, 6 aa, Artificial
  helical interface sequence
ARAWER

SEQ ID NO: 18212 - protein, 14 aa, Artificial
  helical interface sequence
SMEIMEAYSVARQF

SEQ ID NO: 18213 - protein, 17 aa, Artificial
  helical interface sequence
LYEEDKVCAYYAGGKLY

SEQ ID NO: 18214 - protein, 14 aa, Artificial
  helical interface sequence
MESIHRWAWWCAVL

SEQ ID NO: 18215 - protein, 9 aa, Artificial
  helical interface sequence
GPLDEWGIA

SEQ ID NO: 18216 - protein, 16 aa, Artificial
  helical interface sequence
HEAVVKEAGDACFGKY

SEQ ID NO: 18217 - protein, 6 aa, Artificial
  helical interface sequence
SEQLTS

SEQ ID NO: 18218 - protein, 9 aa, Artificial
  helical interface sequence
YNIFLNAIY

SEQ ID NO: 18219 - protein, 22 aa, Artificial
  helical interface sequence
AKDHAEVQTFREKIAAFEEQQE

SEQ ID NO: 18220 - protein, 14 aa, Artificial
  helical interface sequence
EELAELEDALRNLK

SEQ ID NO: 18221 - protein, 11 aa, Artificial
  helical interface sequence
AMDVVYALKRQ

SEQ ID NO: 18222 - protein, 7 aa, Artificial
  helical interface sequence
EELDSLI

SEQ ID NO: 18223 - protein, 29 aa, Artificial
  helical interface sequence
SSAVMALQEASEAYLVALFEDTNLCAIHA

SEQ ID NO: 18224 - protein, 12 aa, Artificial
  helical interface sequence
KGQLKEFLDANL

SEQ ID NO: 18225 - protein, 23 aa, Artificial
  helical interface sequence
EARKNEFLAGRFAAKEAFSKAFG

SEQ ID NO: 18226 - protein, 13 aa, Artificial
  helical interface sequence
DVVELVMELEDEF

SEQ ID NO: 18227 - protein, 10 aa, Artificial
  helical interface sequence
RVALQAEKLD

SEQ ID NO: 18228 - protein, 8 aa, Artificial
  helical interface sequence
LEEINRTF

SEQ ID NO: 18229 - protein, 15 aa, Artificial
  helical interface sequence
THLDAGALTTTFEEL

SEQ ID NO: 18230 - protein, 15 aa, Artificial
  helical interface sequence
ILTILTEVNYEVSNK

SEQ ID NO: 18231 - protein, 17 aa, Artificial
  helical interface sequence
PVNFKLLSHCLLVTLAA

SEQ ID NO: 18232 - protein, 17 aa, Artificial
  helical interface sequence
PVNFKLLSHCLLVTLAA

SEQ ID NO: 18233 - protein, 9 aa, Artificial
  helical interface sequence
EIGIEMKFK

SEQ ID NO: 18234 - protein, 7 aa, Artificial
  helical interface sequence
FSKLASS

SEQ ID NO: 18235 - protein, 18 aa, Artificial
  helical interface sequence
VEEVIKLVRDSFTSATER

SEQ ID NO: 18236 - protein, 18 aa, Artificial
  helical interface sequence
PEDLFETISQALLNAADR

SEQ ID NO: 18237 - protein, 18 aa, Artificial
  helical interface sequence
PEDLFETISQALLNAADR

SEQ ID NO: 18238 - protein, 19 aa, Artificial
  helical interface sequence
VEDALYLGKRSILAAAHRD

SEQ ID NO: 18239 - protein, 13 aa, Artificial
  helical interface sequence
FQVEYALEAIKQG

SEQ ID NO: 18240 - protein, 8 aa, Artificial
  helical interface sequence
VERAGHLL

SEQ ID NO: 18241 - protein, 23 aa, Artificial
  helical interface sequence
AGDTVQFAEYIQANIQLYSIRED

SEQ ID NO: 18242 - protein, 13 aa, Artificial
  helical interface sequence
VGELFWKVKEEEG

SEQ ID NO: 18243 - protein, 7 aa, Artificial
  helical interface sequence
SEQLTSG

SEQ ID NO: 18244 - protein, 8 aa, Artificial
  helical interface sequence
PEEIRKTF

SEQ ID NO: 18245 - protein, 8 aa, Artificial
  helical interface sequence
KRWYRLAS

SEQ ID NO: 18246 - protein, 14 aa, Artificial
  helical interface sequence
QGTLFELILAANYL

SEQ ID NO: 18247 - protein, 20 aa, Artificial
  helical interface sequence
PENFKLLGNVLVVVLARNFG

SEQ ID NO: 18248 - protein, 21 aa, Artificial
  helical interface sequence
PVLQADFQKVVAGVANALAHR

SEQ ID NO: 18249 - protein, 12 aa, Artificial
  helical interface sequence
DTRDAWVNKIAQ

SEQ ID NO: 18250 - protein, 22 aa, Artificial
  helical interface sequence
IPDGRHLVNRGREEAASFKKLY

SEQ ID NO: 18251 - protein, 13 aa, Artificial
  helical interface sequence
ASLIMPFLDNQVN

SEQ ID NO: 18252 - protein, 18 aa, Artificial
  helical interface sequence
GPDYRVLVDKSRKVAHTS

SEQ ID NO: 18253 - protein, 23 aa, Artificial
  helical interface sequence
TADAEILINTARIHAQNYLKTYN

SEQ ID NO: 18254 - protein, 15 aa, Artificial
  helical interface sequence
VEYLTRYVAGVQQRY

SEQ ID NO: 18255 - protein, 15 aa, Artificial
  helical interface sequence
INSAARNIQHLLYGK

SEQ ID NO: 18256 - protein, 15 aa, Artificial
  helical interface sequence
IPAFADRLGQYVQAH

SEQ ID NO: 18257 - protein, 13 aa, Artificial
  helical interface sequence
ASLIMPFLDNQVN

SEQ ID NO: 18258 - protein, 18 aa, Artificial
  helical interface sequence
KEEAIKLASDAIQAGIWN

SEQ ID NO: 18259 - protein, 25 aa, Artificial
  helical interface sequence
PDIYKAFLEILHTYQKEQRNAKEAG

SEQ ID NO: 18260 - protein, 7 aa, Artificial
  helical interface sequence
CPIGLIG

SEQ ID NO: 18261 - protein, 7 aa, Artificial
  helical interface sequence
CPIGLIG

SEQ ID NO: 18262 - protein, 11 aa, Artificial
  helical interface sequence
QDKIDEVFQWT

SEQ ID NO: 18263 - protein, 7 aa, Artificial
  helical interface sequence
CPIGLIG

SEQ ID NO: 18264 - protein, 25 aa, Artificial
  helical interface sequence
SRRMAACLRDMEIILRYVTYAVFAG

SEQ ID NO: 18265 - protein, 25 aa, Artificial
  helical interface sequence
SRRMAACLRDMEIILRYVTYAVFAG

SEQ ID NO: 18266 - protein, 13 aa, Artificial
  helical interface sequence
TAQIDALSQMVAE

SEQ ID NO: 18267 - protein, 25 aa, Artificial
  helical interface sequence
SRRMAACLRDMEIILRYVTYAVFAG

SEQ ID NO: 18268 - protein, 28 aa, Artificial
  helical interface sequence
PTSVARQRLREDHSQLQAECERLRGLLR

SEQ ID NO: 18269 - protein, 12 aa, Artificial
  helical interface sequence
LGNWVCAAKFES

SEQ ID NO: 18270 - protein, 12 aa, Artificial
  helical interface sequence
DETRDSGLKVCP

SEQ ID NO: 18271 - protein, 8 aa, Artificial
  helical interface sequence
PEVQTALH

SEQ ID NO: 18272 - protein, 10 aa, Artificial
  helical interface sequence
VSSTRRSLAA

SEQ ID NO: 18273 - protein, 12 aa, Artificial
  helical interface sequence
SYELEAFVKALK

SEQ ID NO: 18274 - protein, 12 aa, Artificial
  helical interface sequence
AQRVQEVFAWTT

SEQ ID NO: 18275 - protein, 7 aa, Artificial
  helical interface sequence
EDAAVFG

SEQ ID NO: 18276 - protein, 16 aa, Artificial
  helical interface sequence
AADLKAVQDKLKTFVE

SEQ ID NO: 18277 - protein, 13 aa, Artificial
  helical interface sequence
PHYFTQVFSDLKN

SEQ ID NO: 18278 - protein, 9 aa, Artificial
  helical interface sequence
NYGQYLYKM

SEQ ID NO: 18279 - protein, 12 aa, Artificial
  helical interface sequence
PQDTPRFQQLLG

SEQ ID NO: 18280 - protein, 11 aa, Artificial
  helical interface sequence
PDQAQYCIKRM

SEQ ID NO: 18281 - protein, 19 aa, Artificial
  helical interface sequence
PDNFKLLSDCITIVLAAKM

SEQ ID NO: 18282 - protein, 19 aa, Artificial
  helical interface sequence
AQTGLSGWYLSMYLHKEQH

SEQ ID NO: 18283 - protein, 8 aa, Artificial
  helical interface sequence
FGYLADIC

SEQ ID NO: 18284 - protein, 19 aa, Artificial
  helical interface sequence
PENFRLLGDILIIVLAAHF

SEQ ID NO: 18285 - protein, 6 aa, Artificial
  helical interface sequence
SEQLTS

SEQ ID NO: 18286 - protein, 9 aa, Artificial
  helical interface sequence
RPDAEYWNS

SEQ ID NO: 18287 - protein, 11 aa, Artificial
  helical interface sequence
RICLRELAHKG

SEQ ID NO: 18288 - protein, 11 aa, Artificial
  helical interface sequence
PEEVFEQVDKI

SEQ ID NO: 18289 - protein, 11 aa, Artificial
  helical interface sequence
PEEVFEQVDKI

SEQ ID NO: 18290 - protein, 30 aa, Artificial; identical to SEQ ID NO: 1334
  helical interface sequence

SEQ ID NO: 18291 - protein, 5 aa, Artificial
  helical interface sequence
IYNRI

SEQ ID NO: 18292 - protein, 5 aa, Artificial
  helical interface sequence
LVKLW

SEQ ID NO: 18293 - protein, 6 aa, Artificial
  helical interface sequence
AEEEES

SEQ ID NO: 18294 - protein, 50 aa, Artificial; identical to SEQ ID NO: 8349
  helical interface sequence

SEQ ID NO: 18295 - protein, 13 aa, Artificial
  helical interface sequence
WFVQALCSILEEH

SEQ ID NO: 18296 - protein, 18 aa, Artificial
  helical interface sequence
DSVLFYAITTLHNLLLHQ

SEQ ID NO: 18297 - protein, 11 aa, Artificial
  helical interface sequence
YSQCGDVMRAL

SEQ ID NO: 18298 - protein, 14 aa, Artificial
  helical interface sequence
PINIAYATMEALRQ

SEQ ID NO: 18299 - protein, 14 aa, Artificial
  helical interface sequence
ELGRPDAEYWNKQY

SEQ ID NO: 18300 - protein, 18 aa, Artificial
  helical interface sequence
PYAAQLAALDAAKKAMAY

SEQ ID NO: 18301 - protein, 8 aa, Artificial
  helical interface sequence
INQLVRKG

SEQ ID NO: 18302 - protein, 14 aa, Artificial
  helical interface sequence
FEKPFLWLARKLIG

SEQ ID NO: 18303 - protein, 18 aa, Artificial
  helical interface sequence
EHMKESTLEAIGYICQDI

SEQ ID NO: 18304 - protein, 13 aa, Artificial
  helical interface sequence
VLDGIVSYDRAET

SEQ ID NO: 18305 - protein, 12 aa, Artificial
  helical interface sequence
MDYAFQYVQDNG

SEQ ID NO: 18306 - protein, 13 aa, Artificial
  helical interface sequence
KSSLLDAILVGLY

SEQ ID NO: 18307 - protein, 21 aa, Artificial
  helical interface sequence
GGERIALGLAFRLAMSLYLAG

SEQ ID NO: 18308 - protein, 12 aa, Artificial
  helical interface sequence
EAELQDMINEVD

SEQ ID NO: 18309 - protein, 10 aa, Artificial
  helical interface sequence
PELAAACEVW

SEQ ID NO: 18310 - protein, 21 aa, Artificial
  helical interface sequence
NAPGAAANRVALEACTQARNE

SEQ ID NO: 18311 - protein, 15 aa, Artificial
  helical interface sequence
VVTANRMLKQMLFRY

SEQ ID NO: 18312 - protein, 22 aa, Artificial
  helical interface sequence
TADARLLCNFMRQECLDSRFVF

SEQ ID NO: 18313 - protein, 18 aa, Artificial
  helical interface sequence
PRAIHSWLTRAMYSRRSK

SEQ ID NO: 18314 - protein, 9 aa, Artificial
  helical interface sequence
AEQMYGMCE

SEQ ID NO: 18315 - protein, 23 aa, Artificial
  helical interface sequence
TADSRSQVQRARYEAANWKYKYG

SEQ ID NO: 18316 - protein, 22 aa, Artificial
  helical interface sequence
TADARLLCNFMRQECLDSRFVF

SEQ ID NO: 18317 - protein, 8 aa, Artificial
  helical interface sequence
VKAARRML

SEQ ID NO: 18318 - protein, 11 aa, Artificial
  helical interface sequence
PDEALLAVAHG

SEQ ID NO: 18319 - protein, 9 aa, Artificial
  helical interface sequence
VILERERLD

SEQ ID NO: 18320 - protein, 15 aa, Artificial
  helical interface sequence
GKNYGRVVYEALKGG

SEQ ID NO: 18321 - protein, 9 aa, Artificial
  helical interface sequence
VILERERLD

SEQ ID NO: 18322 - protein, 22 aa, Artificial
  helical interface sequence
SVWVSNHYRWIVWKLAAMEFAF

SEQ ID NO: 18323 - protein, 10 aa, Artificial
  helical interface sequence
ALRAYVKDHY

SEQ ID NO: 18324 - protein, 9 aa, Artificial
  helical interface sequence
YCRHNYGVG

SEQ ID NO: 18325 - protein, 8 aa, Artificial
  helical interface sequence
EAEISHTQ

SEQ ID NO: 18326 - protein, 10 aa, Artificial
  helical interface sequence
RTFSERTLAF

SEQ ID NO: 18327 - protein, 7 aa, Artificial
  helical interface sequence
VLDRVLR

SEQ ID NO: 18328 - protein, 15 aa, Artificial
  helical interface sequence
KEQCLALAAQQLRPR

SEQ ID NO: 18329 - protein, 22 aa, Artificial
  helical interface sequence
AGDTVQFAEYIQANIQLYSIRE

SEQ ID NO: 18330 - protein, 22 aa, Artificial
  helical interface sequence
TADARSMIEHARTAAVTHNLYY

SEQ ID NO: 18331 - protein, 22 aa, Artificial
  helical interface sequence
TADARSMIEHARTAAVTHNLYY

SEQ ID NO: 18332 - protein, 19 aa, Artificial
  helical interface sequence
VQVAEEAIVNAMRVLYYRD

SEQ ID NO: 18333 - protein, 21 aa, Artificial
  helical interface sequence
AADGDALVKRFKNSVKWYHFD

SEQ ID NO: 18334 - protein, 6 aa, Artificial
  helical interface sequence
PDEYEQ

SEQ ID NO: 18335 - protein, 18 aa, Artificial
  helical interface sequence
VEEVIKLVRDSFTSATER

SEQ ID NO: 18336 - protein, 18 aa, Artificial
  helical interface sequence
KEEAIKLASDAIQAGIWN

SEQ ID NO: 18337 - protein, 22 aa, Artificial
  helical interface sequence
AGDTVQFAEYIQANIQLYSIRE

SEQ ID NO: 18338 - protein, 15 aa, Artificial
  helical interface sequence
VAAASKILSNLVYQY

SEQ ID NO: 18339 - protein, 21 aa, Artificial
  helical interface sequence
AADGDALVKRFKNSVKWYHFD

SEQ ID NO: 18340 - protein, 15 aa, Artificial
  helical interface sequence
VAAASKILSNLVYQY

SEQ ID NO: 18341 - protein, 22 aa, Artificial
  helical interface sequence
TADARSMIEHARTAAVTHNLYY

SEQ ID NO: 18342 - protein, 5 aa, Artificial
  helical interface sequence
CVSAG

SEQ ID NO: 18343 - protein, 31 aa, Artificial
  helical interface sequence
GLRSAVSDVEMQEHYDEFFEEVFTEMEEKYG

SEQ ID NO: 18344 - protein, 19 aa, Artificial
  helical interface sequence
LDTKLDQYWTALNLMIDSS

SEQ ID NO: 18345 - protein, 17 aa, Artificial
  helical interface sequence
EHAIANFTKAEMALEFN

SEQ ID NO: 18346 - protein, 15 aa, Artificial
  helical interface sequence
AKEWEHLVNFHLGQW

SEQ ID NO: 18347 - protein, 19 aa, Artificial
  helical interface sequence
KKTLQKIGAACVLIGSKIR

SEQ ID NO: 18348 - protein, 16 aa, Artificial
  helical interface sequence
QRLVQNCLWTLRNLSD

SEQ ID NO: 18349 - protein, 15 aa, Artificial
  helical interface sequence
INVVTCAAGILSNLT

SEQ ID NO: 18350 - protein, 10 aa, Artificial
  helical interface sequence
LRDALSLTDQ

SEQ ID NO: 18351 - protein, 5 aa, Artificial
  helical interface sequence
YDDLL

SEQ ID NO: 18352 - protein, 16 aa, Artificial
  helical interface sequence
PVNFKLLSHCLLVTLA

SEQ ID NO: 18353 - protein, 14 aa, Artificial
  helical interface sequence
EVGGEALGRLLVVY

SEQ ID NO: 18354 - protein, 14 aa, Artificial
  helical interface sequence
EVGGEALGRLLVVY

SEQ ID NO: 18355 - protein, 16 aa, Artificial
  helical interface sequence
PVNFKLLSHCLLVTLA

SEQ ID NO: 18356 - protein, 19 aa, Artificial
  helical interface sequence
PAVHASLDKFLASVSTVLT

SEQ ID NO: 18357 - protein, 6 aa, Artificial
  helical interface sequence
LYQLEN

SEQ ID NO: 18358 - protein, 8 aa, Artificial
  helical interface sequence
EPFLDFLL

SEQ ID NO: 18359 - protein, 6 aa, Artificial
  helical interface sequence
SEQLTS

SEQ ID NO: 18360 - protein, 14 aa, Artificial
  helical interface sequence
DVVDEIREVFSTRG

SEQ ID NO: 18361 - protein, 8 aa, Artificial
  helical interface sequence
WYVWGQNH

SEQ ID NO: 18362 - protein, 7 aa, Artificial
  helical interface sequence
GKLNRVI

SEQ ID NO: 18363 - protein, 21 aa, Artificial
  helical interface sequence
IQDLEKYVEDTKIDLWSYNAE

SEQ ID NO: 18364 - protein, 23 aa, Artificial
  helical interface sequence
PEPIIKSLWAVTVVATIVILFVA

SEQ ID NO: 18365 - protein, 11 aa, Artificial
  helical interface sequence
CPTEMTQLELW

SEQ ID NO: 18366 - protein, 7 aa, Artificial
  helical interface sequence
PAQMAKY

SEQ ID NO: 18367 - protein, 21 aa, Artificial
  helical interface sequence
GKWVFYGLAAILTVVTLIGVV

SEQ ID NO: 18368 - protein, 8 aa, Artificial
  helical interface sequence
AIIRKALM

SEQ ID NO: 18369 - protein, 5 aa, Artificial
  helical interface sequence
PKGAG

SEQ ID NO: 18370 - protein, 5 aa, Artificial
  helical interface sequence
EEFAK

SEQ ID NO: 18371 - protein, 21 aa, Artificial
  helical interface sequence
PHELTESVLPAARYDYAVAEQ

SEQ ID NO: 18372 - protein, 8 aa, Artificial
  helical interface sequence
PHEIQEAN

SEQ ID NO: 18373 - protein, 23 aa, Artificial
  helical interface sequence
MDELTEIKTVVSEAVTNAIIHGY

SEQ ID NO: 18374 - protein, 5 aa, Artificial
  helical interface sequence
QSKYL

SEQ ID NO: 18375 - protein, 17 aa, Artificial
  helical interface sequence
YREYGRRLVMSIRRSAL

SEQ ID NO: 18376 - protein, 16 aa, Artificial
  helical interface sequence
YTQLEMLVQGAERLQT

SEQ ID NO: 18377 - protein, 14 aa, Artificial
  helical interface sequence
CRTMKNVLNHMTHC

SEQ ID NO: 18378 - protein, 18 aa, Artificial
  helical interface sequence
TLGIHRLGLLLSLSAVFF

SEQ ID NO: 18379 - protein, 14 aa, Artificial
  helical interface sequence
MEGIHRWAIWMAVL

SEQ ID NO: 18380 - protein, 17 aa, Artificial
  helical interface sequence
HTAWAFLSAIWLWMVLG

SEQ ID NO: 18381 - protein, 7 aa, Artificial
  helical interface sequence
ELEQIAD

SEQ ID NO: 18382 - protein, 25 aa, Artificial
  helical interface sequence
AEDLQEALSSILGILKAVNDSMHLI

SEQ ID NO: 18383 - protein, 12 aa, Artificial
  helical interface sequence
WIALGAAKSAAK

SEQ ID NO: 18384 - protein, 12 aa, Artificial
  helical interface sequence
WIALGAAKSAAK

SEQ ID NO: 18385 - protein, 12 aa, Artificial
  helical interface sequence
WIALGAAKSAAK

SEQ ID NO: 18386 - protein, 12 aa, Artificial
  helical interface sequence
WIALGAAKSAAK

SEQ ID NO: 18387 - protein, 10 aa, Artificial
  helical interface sequence
EKGIYKAMSE

SEQ ID NO: 18388 - protein, 5 aa, Artificial
  helical interface sequence
TEQLA

SEQ ID NO: 18389 - protein, 8 aa, Artificial
  helical interface sequence
KEDFRYRS

SEQ ID NO: 18390 - protein, 11 aa, Artificial
  helical interface sequence
CRHNYEGPETH

SEQ ID NO: 18391 - protein, 11 aa, Artificial
  helical interface sequence
EKTLRKWLKMF

SEQ ID NO: 18392 - protein, 11 aa, Artificial
  helical interface sequence
DTFVSAMKTLY

SEQ ID NO: 18393 - protein, 11 aa, Artificial
  helical interface sequence
EKTLRKWLKMF

SEQ ID NO: 18394 - protein, 10 aa, Artificial
  helical interface sequence
QESKLIILAS

SEQ ID NO: 18395 - protein, 9 aa, Artificial
  helical interface sequence
GVTNLLIKY

SEQ ID NO: 18396 - protein, 5 aa, Artificial
  helical interface sequence
QEKKR

SEQ ID NO: 18397 - protein, 12 aa, Artificial
  helical interface sequence
KNLQLEKAASYI

SEQ ID NO: 18398 - protein, 31 aa, Artificial; identical to SEQ ID NO: 10788
  helical interface sequence

SEQ ID NO: 18399 - protein, 11 aa, Artificial
  helical interface sequence
VDEVRELQKAI

SEQ ID NO: 18400 - protein, 15 aa, Artificial
  helical interface sequence
EDITEPAICALRHLT

SEQ ID NO: 18401 - protein, 13 aa, Artificial
  helical interface sequence
GCELQTTLLKQEK

SEQ ID NO: 18402 - protein, 12 aa, Artificial
  helical interface sequence
FSDTSTTMYQYV

SEQ ID NO: 18403 - protein, 7 aa, Artificial
  helical interface sequence
WVQYKEG

SEQ ID NO: 18404 - protein, 26 aa, Artificial
  helical interface sequence
TWRIMTTLNMLGGRQVIAAVKWAKAI

SEQ ID NO: 18405 - protein, 6 aa, Artificial
  helical interface sequence
IFTLFD

SEQ ID NO: 18406 - protein, 29 aa, Artificial
  helical interface sequence
ATWNFVSSLGAFLSFASFLFFLGVIFYTL

SEQ ID NO: 18407 - protein, 33 aa, Artificial
  helical interface sequence
TQQEKTFAGFVRMVTWAAVVIVAALIFLALANA

SEQ ID NO: 18408 - protein, 15 aa, Artificial
  helical interface sequence
VFTWSLPFVGEKVTE

SEQ ID NO: 18409 - protein, 8 aa, Artificial
  helical interface sequence
DSFLRKIG

SEQ ID NO: 18410 - protein, 9 aa, Artificial
  helical interface sequence
QAVLSLYAS

SEQ ID NO: 18411 - protein, 30 aa, Artificial
  helical interface sequence
WNEILWAGHAVYDATFGQFARREFFQRLAT

SEQ ID NO: 18412 - protein, 36 aa, Artificial; identical to SEQ ID NO: 17314
  helical interface sequence

SEQ ID NO: 18413 - protein, 30 aa, Artificial; identical to SEQ ID NO: 2910
  helical interface sequence

SEQ ID NO: 18414 - protein, 36 aa, Artificial; identical to SEQ ID NO: 17314
  helical interface sequence

SEQ ID NO: 18415 - protein, 15 aa, Artificial
  helical interface sequence
EIEAKVRYVKLARSL

SEQ ID NO: 18416 - protein, 6 aa, Artificial
  helical interface sequence
EVDFRH

SEQ ID NO: 18417 - protein, 20 aa, Artificial
  helical interface sequence
GIRLLAQVVQKIGKEALVIW

SEQ ID NO: 18418 - protein, 11 aa, Artificial
  helical interface sequence
KDDLRETFAAM

SEQ ID NO: 18419 - protein, 11 aa, Artificial
  helical interface sequence
AAELRHVMTNL

SEQ ID NO: 18420 - protein, 11 aa, Artificial
  helical interface sequence
AAELRHVMTNL

SEQ ID NO: 18421 - protein, 11 aa, Artificial
  helical interface sequence
LDDQVILLRAG

SEQ ID NO: 18422 - protein, 11 aa, Artificial
  helical interface sequence
LDDQVILLRAG

SEQ ID NO: 18423 - protein, 9 aa, Artificial
  helical interface sequence
KADVERLRK

SEQ ID NO: 18424 - protein, 13 aa, Artificial
  helical interface sequence
AFDFYKVIESFIK

SEQ ID NO: 18425 - protein, 13 aa, Artificial
  helical interface sequence
KEYWRYIGRSLQS

SEQ ID NO: 18426 - protein, 7 aa, Artificial
  helical interface sequence
VEDIRFT

SEQ ID NO: 18427 - protein, 14 aa, Artificial
  helical interface sequence
QKEIENRYKEVKIR

SEQ ID NO: 18428 - protein, 9 aa, Artificial
  helical interface sequence
LLQKNVRAQ

SEQ ID NO: 18429 - protein, 5 aa, Artificial
  helical interface sequence
DEQLK

SEQ ID NO: 18430 - protein, 9 aa, Artificial
  helical interface sequence
IFESFVDYV

SEQ ID NO: 18431 - protein, 16 aa, Artificial
  helical interface sequence
DDQLRTLGANAGQLVK

SEQ ID NO: 18432 - protein, 8 aa, Artificial
  helical interface sequence
ASSLRSGE

SEQ ID NO: 18433 - protein, 16 aa, Artificial
  helical interface sequence
PTRAIGHIKSMLLQRN

SEQ ID NO: 18434 - protein, 13 aa, Artificial
  helical interface sequence
VKDIIFAIKKTLN

SEQ ID NO: 18435 - protein, 9 aa, Artificial
  helical interface sequence
FINIAQMSA

SEQ ID NO: 18436 - protein, 6 aa, Artificial
  helical interface sequence
YEEFVQ

SEQ ID NO: 18437 - protein, 6 aa, Artificial
  helical interface sequence
SEQLTS

SEQ ID NO: 18438 - protein, 6 aa, Artificial
  helical interface sequence
MERLVR

SEQ ID NO: 18439 - protein, 7 aa, Artificial
  helical interface sequence
YNRIRSG

SEQ ID NO: 18440 - protein, 23 aa, Artificial
  helical interface sequence
PQLALQVLLQFDKAINAALAQRV

SEQ ID NO: 18441 - protein, 9 aa, Artificial
  helical interface sequence
EDFVEGLRV

SEQ ID NO: 18442 - protein, 12 aa, Artificial
  helical interface sequence
FTVFLTMFGEKL

SEQ ID NO: 18443 - protein, 17 aa, Artificial
  helical interface sequence
EWDDFSLEEAMKIKESS

SEQ ID NO: 18444 - protein, 36 aa, Artificial; identical to SEQ ID NO: 17314
  helical interface sequence

SEQ ID NO: 18445 - protein, 36 aa, Artificial
  helical interface sequence
QIYNVVVTAHAFVMIFFMVMPIMIGGFGNWLVPLMI

SEQ ID NO: 18446 - protein, 23 aa, Artificial
  helical interface sequence
PWPLTGALSALLMTSGLTMWFHF

SEQ ID NO: 18447 - protein, 14 aa, Artificial
  helical interface sequence
PKIIDAALRACRRL

SEQ ID NO: 18448 - protein, 11 aa, Artificial
  helical interface sequence
SMKDFEEMRKA

SEQ ID NO: 18449 - protein, 7 aa, Artificial
  helical interface sequence
PIQGFSA

SEQ ID NO: 18450 - protein, 14 aa, Artificial
  helical interface sequence
AWELRKGMNTLVGY

SEQ ID NO: 18451 - protein, 32 aa, Artificial; identical to SEQ ID NO: 1080
  helical interface sequence

SEQ ID NO: 18452 - protein, 11 aa, Artificial
  helical interface sequence
EWYRRVYKSLC

SEQ ID NO: 18453 - protein, 23 aa, Artificial
  helical interface sequence
PWPLTGALSALLMTSGLTMWFHF

SEQ ID NO: 18454 - protein, 14 aa, Artificial
  helical interface sequence
PKIIDAALRACRRL

SEQ ID NO: 18455 - protein, 11 aa, Artificial
  helical interface sequence
SMKDFEEMRKA

SEQ ID NO: 18456 - protein, 14 aa, Artificial
  helical interface sequence
AWELRKGMNTLVGY

SEQ ID NO: 18457 - protein, 6 aa, Artificial
  helical interface sequence
DEDVAL

SEQ ID NO: 18458 - protein, 16 aa, Artificial
  helical interface sequence
SEQTVNVLAQILKRLN

SEQ ID NO: 18459 - protein, 12 aa, Artificial
  helical interface sequence
IKDLRRVAKELG

SEQ ID NO: 18460 - protein, 7 aa, Artificial
  helical interface sequence
QIERVSR

SEQ ID NO: 18461 - protein, 14 aa, Artificial
  helical interface sequence
SEELRQIVFRTIES

SEQ ID NO: 18462 - protein, 6 aa, Artificial
  helical interface sequence
SEQLTS

SEQ ID NO: 18463 - protein, 7 aa, Artificial
  helical interface sequence
PLLCEIW

SEQ ID NO: 18464 - protein, 8 aa, Artificial
  helical interface sequence
PLLCEIWD

SEQ ID NO: 18465 - protein, 19 aa, Artificial
  helical interface sequence
DNFRVLADVLTIVIAAKFG

SEQ ID NO: 18466 - protein, 24 aa, Artificial
  helical interface sequence
PEEYVPMVKEVGLALRTLLATVDE

SEQ ID NO: 18467 - protein, 5 aa, Artificial
  helical interface sequence
KSIIN

SEQ ID NO: 18468 - protein, 12 aa, Artificial
  helical interface sequence
GLLSTKMIRRDL

SEQ ID NO: 18469 - protein, 12 aa, Artificial
  helical interface sequence
GLLSTKMIRRDL

SEQ ID NO: 18470 - protein, 18 aa, Artificial
  helical interface sequence
LTELDNLGHFLKGSSAAL

SEQ ID NO: 18471 - protein, 26 aa, Artificial
  helical interface sequence
FSKGLIIQFIDQAQTTFAQMQRQLDG

SEQ ID NO: 18472 - protein, 7 aa, Artificial
  helical interface sequence
GQALLLL

SEQ ID NO: 18473 - protein, 7 aa, Artificial
  helical interface sequence
GQALLLL

SEQ ID NO: 18474 - protein, 9 aa, Artificial
  helical interface sequence
VAALRRCMY

SEQ ID NO: 18475 - protein, 11 aa, Artificial
  helical interface sequence
AVPRAILELAG

SEQ ID NO: 18476 - protein, 8 aa, Artificial
  helical interface sequence
KADVERLR

SEQ ID NO: 18477 - protein, 15 aa, Artificial
  helical interface sequence
ILSHLDWVNNFGYQY

SEQ ID NO: 18478 - protein, 12 aa, Artificial
  helical interface sequence
QEVVDKVMETLD

SEQ ID NO: 18479 - protein, 12 aa, Artificial
  helical interface sequence
PMEVMLRAVFMQ

SEQ ID NO: 18480 - protein, 29 aa, Artificial
  helical interface sequence
LSLHSKLNATADILRGLLSNVLCRLCSKY

SEQ ID NO: 18481 - protein, 6 aa, Artificial
  helical interface sequence
IERAAS

SEQ ID NO: 18482 - protein, 7 aa, Artificial
  helical interface sequence
FTDYLRG

SEQ ID NO: 18483 - protein, 19 aa, Artificial
  helical interface sequence
GRSLANAYAQTLGTIFTEQ

SEQ ID NO: 18484 - protein, 19 aa, Artificial
  helical interface sequence
GRSLANAYAQTLGTIFTEQ

SEQ ID NO: 18485 - protein, 25 aa, Artificial
  helical interface sequence
ELTWVTGVIMAVCTVSFGVTGYSLP

SEQ ID NO: 18486 - protein, 16 aa, Artificial
  helical interface sequence
ASCIVSDAVSGMICEN

SEQ ID NO: 18487 - protein, 8 aa, Artificial
  helical interface sequence
WPFFGAIG

SEQ ID NO: 18488 - protein, 14 aa, Artificial
  helical interface sequence
PDRYRLCAEDFIRN

SEQ ID NO: 18489 - protein, 11 aa, Artificial
  helical interface sequence
PAVLSQIIELE

SEQ ID NO: 18490 - protein, 19 aa, Artificial
  helical interface sequence
PVNFKLLSHCLLVTLAAHH

SEQ ID NO: 18491 - protein, 14 aa, Artificial
  helical interface sequence
MKDLQAIKQEVSQA

SEQ ID NO: 18492 - protein, 14 aa, Artificial
  helical interface sequence
KATKKRLAKLDNQN

SEQ ID NO: 18493 - protein, 15 aa, Artificial
  helical interface sequence
QKQIQEMKEAFSMID

SEQ ID NO: 18494 - protein, 9 aa, Artificial
  helical interface sequence
YRLTQGVVK

SEQ ID NO: 18495 - protein, 5 aa, Artificial
  helical interface sequence
DRQLR

SEQ ID NO: 18496 - protein, 22 aa, Artificial
  helical interface sequence
NYQVEEDIGKLKSCLTGFLQEY

SEQ ID NO: 18497 - protein, 5 aa, Artificial
  helical interface sequence
DRQLR

SEQ ID NO: 18498 - protein, 5 aa, Artificial
  helical interface sequence
DRQLR

SEQ ID NO: 18499 - protein, 13 aa, Artificial
  helical interface sequence
YKEKEDFRDLIRQ

SEQ ID NO: 18500 - protein, 10 aa, Artificial
  helical interface sequence
WGRLSSVLPD

SEQ ID NO: 18501 - protein, 13 aa, Artificial
  helical interface sequence
WNLQSLLLSAQIT

SEQ ID NO: 18502 - protein, 13 aa, Artificial
  helical interface sequence
WNLQSLLLSAQIT

SEQ ID NO: 18503 - protein, 14 aa, Artificial
  helical interface sequence
TDQLARQVDYLLNN

SEQ ID NO: 18504 - protein, 14 aa, Artificial
  helical interface sequence
TDQLARQVDYLLNN

SEQ ID NO: 18505 - protein, 14 aa, Artificial
  helical interface sequence
TDQLARQVDYLLNN

SEQ ID NO: 18506 - protein, 14 aa, Artificial
  helical interface sequence
TDQLARQVDYLLNN

SEQ ID NO: 18507 - protein, 14 aa, Artificial
  helical interface sequence
TDQLARQVDYLLNN

SEQ ID NO: 18508 - protein, 10 aa, Artificial
  helical interface sequence
VSHILNVLKD

SEQ ID NO: 18509 - protein, 12 aa, Artificial
  helical interface sequence
LGNWVCAAKFES

SEQ ID NO: 18510 - protein, 8 aa, Artificial
  helical interface sequence
REETFIAH

SEQ ID NO: 18511 - protein, 15 aa, Artificial
  helical interface sequence
TPGMIMASEALLRKN

SEQ ID NO: 18512 - protein, 8 aa, Artificial
  helical interface sequence
AKEVAKIL

SEQ ID NO: 18513 - protein, 15 aa, Artificial
  helical interface sequence
PYSNQIEREELILKY

SEQ ID NO: 18514 - protein, 17 aa, Artificial
  helical interface sequence
QHLHTLLDLYDKINTKS

SEQ ID NO: 18515 - protein, 20 aa, Artificial
  helical interface sequence
DVKQLTEAVQKITTESIVIW

SEQ ID NO: 18516 - protein, 18 aa, Artificial
  helical interface sequence
VNDIQKLVGKLNWASQIY

SEQ ID NO: 18517 - protein, 10 aa, Artificial
  helical interface sequence
YEELREQLSS

SEQ ID NO: 18518 - protein, 10 aa, Artificial
  helical interface sequence
YEELREQLSS

SEQ ID NO: 18519 - protein, 10 aa, Artificial
  helical interface sequence
YEELREQLSS

SEQ ID NO: 18520 - protein, 18 aa, Artificial
  helical interface sequence
CDVLAKRMANLSQIYTQR

SEQ ID NO: 18521 - protein, 22 aa, Artificial
  helical interface sequence
APDARVLSNYLRQQCNYSSLVF

SEQ ID NO: 18522 - protein, 22 aa, Artificial
  helical interface sequence
AADGDALVKRFKNSVKWYHFDH

SEQ ID NO: 18523 - protein, 17 aa, Artificial
  helical interface sequence
PQAVSSFVRQELAKSIR

SEQ ID NO: 18524 - protein, 15 aa, Artificial
  helical interface sequence
IPAFADRLGQYVQAH

SEQ ID NO: 18525 - protein, 6 aa, Artificial
  helical interface sequence
LDTFIK

SEQ ID NO: 18526 - protein, 18 aa, Artificial
  helical interface sequence
KEEAIKLASDAIQAGIWN

SEQ ID NO: 18527 - protein, 18 aa, Artificial
  helical interface sequence
VQVAEEAIVNAMRVLYYR

SEQ ID NO: 18528 - protein, 6 aa, Artificial
  helical interface sequence
DEQLKS

SEQ ID NO: 18529 - protein, 9 aa, Artificial
  helical interface sequence
DRLRPLSYP

SEQ ID NO: 18530 - protein, 9 aa, Artificial
  helical interface sequence
ISQEIRAAE

SEQ ID NO: 18531 - protein, 10 aa, Artificial
  helical interface sequence
PPTVKSYARK

SEQ ID NO: 18532 - protein, 21 aa, Artificial
  helical interface sequence
IVATVAGMGVIVIVGLFFYGA

SEQ ID NO: 18533 - protein, 19 aa, Artificial
  helical interface sequence
ESNKENREAHLAAMLERLQ

SEQ ID NO: 18534 - protein, 9 aa, Artificial
  helical interface sequence
KLQAAFHEK

SEQ ID NO: 18535 - protein, 6 aa, Artificial
  helical interface sequence
SEQLTS

SEQ ID NO: 18536 - protein, 16 aa, Artificial
  helical interface sequence
IEATGLMLMSNLFTLR

SEQ ID NO: 18537 - protein, 15 aa, Artificial
  helical interface sequence
PAHLMALLQHVALQF

SEQ ID NO: 18538 - protein, 16 aa, Artificial
  helical interface sequence
SEGFLDEVGSQALAAG

SEQ ID NO: 18539 - protein, 33 aa, Artificial; identical to SEQ ID NO: 3637
  helical interface sequence

SEQ ID NO: 18540 - protein, 11 aa, Artificial
  helical interface sequence
SFKITRGIEAV

SEQ ID NO: 18541 - protein, 18 aa, Artificial
  helical interface sequence
IDDMMFVLQGQWMRLCTS

SEQ ID NO: 18542 - protein, 33 aa, Artificial; identical to SEQ ID NO: 9034
  helical interface sequence

SEQ ID NO: 18543 - protein, 20 aa, Artificial
  helical interface sequence
EKCVKARERLELCDERVSSR

SEQ ID NO: 18544 - protein, 35 aa, Artificial; identical to SEQ ID NO: 2150
  helical interface sequence

SEQ ID NO: 18545 - protein, 20 aa, Artificial
  helical interface sequence
ENLYDDRVFRIKRALDLSMR

SEQ ID NO: 18546 - protein, 17 aa, Artificial
  helical interface sequence
GDVLHNVLQMLIIESHS

SEQ ID NO: 18547 - protein, 20 aa, Artificial
  helical interface sequence
ESVRLEMIKEIGLTHMRILE

SEQ ID NO: 18548 - protein, 20 aa, Artificial
  helical interface sequence
DVKQLTEAVQKITTESIVIW

SEQ ID NO: 18549 - protein, 7 aa, Artificial
  helical interface sequence
KETWETW

SEQ ID NO: 18550 - protein, 10 aa, Artificial
  helical interface sequence
LADALREVVG

SEQ ID NO: 18551 - protein, 9 aa, Artificial
  helical interface sequence
RAIAEDAAQ

SEQ ID NO: 18552 - protein, 6 aa, Artificial
  helical interface sequence
SEQLTS

SEQ ID NO: 18553 - protein, 8 aa, Artificial
  helical interface sequence
VAWRNRCK

SEQ ID NO: 18554 - protein, 12 aa, Artificial
  helical interface sequence
TASVNCAKKIVS

SEQ ID NO: 18555 - protein, 11 aa, Artificial
  helical interface sequence
VPLIRRAWELG

SEQ ID NO: 18556 - protein, 10 aa, Artificial
  helical interface sequence
LPNIMKAKKK

SEQ ID NO: 18557 - protein, 15 aa, Artificial
  helical interface sequence
VETARCTAGTLHNLS

SEQ ID NO: 18558 - protein, 5 aa, Artificial
  helical interface sequence
VELRI

SEQ ID NO: 18559 - protein, 6 aa, Artificial
  helical interface sequence
HTARLV

SEQ ID NO: 18560 - protein, 5 aa, Artificial
  helical interface sequence
NQYQN

SEQ ID NO: 18561 - protein, 20 aa, Artificial
  helical interface sequence
VTSIEQAKVEEKIQEVFSSY

SEQ ID NO: 18562 - protein, 8 aa, Artificial
  helical interface sequence
KQTAAKLL

SEQ ID NO: 18563 - protein, 31 aa, Artificial; identical to SEQ ID NO: 5073
  helical interface sequence

SEQ ID NO: 18564 - protein, 5 aa, Artificial
  helical interface sequence
ERYHS

SEQ ID NO: 18565 - protein, 14 aa, Artificial
  helical interface sequence
LVPSYAEKEAKISR

SEQ ID NO: 18566 - protein, 14 aa, Artificial
  helical interface sequence
LVPSYAEKEAKISR

SEQ ID NO: 18567 - protein, 14 aa, Artificial
  helical interface sequence
LVPSYAEKEAKISR

SEQ ID NO: 18568 - protein, 14 aa, Artificial
  helical interface sequence
LVPSYAEKEAKISR

SEQ ID NO: 18569 - protein, 14 aa, Artificial
  helical interface sequence
LVPSYAEKEAKISR

SEQ ID NO: 18570 - protein, 14 aa, Artificial
  helical interface sequence
LVPSYAEKEAKISR

SEQ ID NO: 18571 - protein, 14 aa, Artificial
  helical interface sequence
LVPSYAEKEAKISR

SEQ ID NO: 18572 - protein, 20 aa, Artificial
  helical interface sequence
SLTRRQQISTWIDIISQYCK

SEQ ID NO: 18573 - protein, 33 aa, Artificial
  helical interface sequence
KTEQKQEQETTHKNIEEDRKLLIQAAIVRIMKM

SEQ ID NO: 18574 - protein, 18 aa, Artificial
  helical interface sequence
EQLRDISSIGLKTVIGEL

SEQ ID NO: 18575 - protein, 12 aa, Artificial
  helical interface sequence
PSLENIYKELST

SEQ ID NO: 18576 - protein, 9 aa, Artificial
  helical interface sequence
PEEVEEVIG

SEQ ID NO: 18577 - protein, 6 aa, Artificial
  helical interface sequence
KSGVLR

SEQ ID NO: 18578 - protein, 6 aa, Artificial
  helical interface sequence
AEQLAS

SEQ ID NO: 18579 - protein, 5 aa, Artificial
  helical interface sequence
LDRYK

SEQ ID NO: 18580 - protein, 12 aa, Artificial
  helical interface sequence
GGDVIRSACKWS

SEQ ID NO: 18581 - protein, 20 aa, Artificial
  helical interface sequence
WRDRFLFVAEAIYKAQAETG

SEQ ID NO: 18582 - protein, 12 aa, Artificial
  helical interface sequence
GGDVIRSACKWS

SEQ ID NO: 18583 - protein, 12 aa, Artificial
  helical interface sequence
GGDVIRSACKWS

SEQ ID NO: 18584 - protein, 19 aa, Artificial
  helical interface sequence
VETQCAFQKFLAVVVFALG

SEQ ID NO: 18585 - protein, 6 aa, Artificial
  helical interface sequence
PDAIKG

SEQ ID NO: 18586 - protein, 16 aa, Artificial
  helical interface sequence
YMGMVWAMMSIGFLGF

SEQ ID NO: 18587 - protein, 14 aa, Artificial
  helical interface sequence
ISWVSTWDDRRAEG

SEQ ID NO: 18588 - protein, 11 aa, Artificial
  helical interface sequence
EWYRRVYKSLC

SEQ ID NO: 18589 - protein, 28 aa, Artificial
  helical interface sequence
KWRLLAMMTLFFGSGFAAPFFIVRHQLL

SEQ ID NO: 18590 - protein, 6 aa, Artificial
  helical interface sequence
LDNYKK

SEQ ID NO: 18591 - protein, 19 aa, Artificial
  helical interface sequence
PENFKLLGNILIIVLATHF

SEQ ID NO: 18592 - protein, 12 aa, Artificial
  helical interface sequence
VFELKRIVEGIL

SEQ ID NO: 18593 - protein, 10 aa, Artificial
  helical interface sequence
AYASVQYIMN

SEQ ID NO: 18594 - protein, 25 aa, Artificial
  helical interface sequence
ELTWISGVILAVITVSFGVTGYSLP

SEQ ID NO: 18595 - protein, 25 aa, Artificial
  helical interface sequence
PNRVKWMIAFICLVMLAQLMLILKK

SEQ ID NO: 18596 - protein, 24 aa, Artificial
  helical interface sequence
VLGWVALLVVFTWSIAMVVWGRNG

SEQ ID NO: 18597 - protein, 7 aa, Artificial
  helical interface sequence
VLGLVFA

SEQ ID NO: 18598 - protein, 24 aa, Artificial
  helical interface sequence
VLGWVALLVVFTWSIAMVVWGRNG

SEQ ID NO: 18599 - protein, 11 aa, Artificial
  helical interface sequence
TNETTKSIERG

SEQ ID NO: 18600 - protein, 9 aa, Artificial
  helical interface sequence
YHQRLRLLK

SEQ ID NO: 18601 - protein, 24 aa, Artificial
  helical interface sequence
PAEREAELDDLKTELLNARAVQAA

SEQ ID NO: 18602 - protein, 8 aa, Artificial
  helical interface sequence
PGGKTVRR

SEQ ID NO: 18603 - protein, 10 aa, Artificial
  helical interface sequence
VADVLRATGA

SEQ ID NO: 18604 - protein, 15 aa, Artificial
  helical interface sequence
KKQVLRMEHLVLKVL

SEQ ID NO: 18605 - protein, 11 aa, Artificial
  helical interface sequence
TLQLAVICKQF

SEQ ID NO: 18606 - protein, 11 aa, Artificial
  helical interface sequence
TLQLAVICKQF

SEQ ID NO: 18607 - protein, 7 aa, Artificial
  helical interface sequence
ISGTFNF

SEQ ID NO: 18608 - protein, 7 aa, Artificial
  helical interface sequence
SQEIRAA

SEQ ID NO: 18609 - protein, 6 aa, Artificial
  helical interface sequence
RYQWDS

SEQ ID NO: 18610 - protein, 6 aa, Artificial
  helical interface sequence
AKLHDI

SEQ ID NO: 18611 - protein, 18 aa, Artificial
  helical interface sequence
KEKKKEAVKKVIASMTVG

SEQ ID NO: 18612 - protein, 17 aa, Artificial
  helical interface sequence
YVVQEAIVVIKDIFRKY

SEQ ID NO: 18613 - protein, 6 aa, Artificial
  helical interface sequence
AKLHDI

SEQ ID NO: 18614 - protein, 18 aa, Artificial
  helical interface sequence
KEKKKEAVKKVIASMTVG

SEQ ID NO: 18615 - protein, 6 aa, Artificial
  helical interface sequence
AKLHDI

SEQ ID NO: 18616 - protein, 18 aa, Artificial
  helical interface sequence
KEKKKEAVKKVIASMTVG

SEQ ID NO: 18617 - protein, 6 aa, Artificial
  helical interface sequence
AKLHDI

SEQ ID NO: 18618 - protein, 18 aa, Artificial
  helical interface sequence
KEKKKEAVKKVIASMTVG

SEQ ID NO: 18619 - protein, 6 aa, Artificial
  helical interface sequence
AKLHDI

SEQ ID NO: 18620 - protein, 18 aa, Artificial
  helical interface sequence
KEKKKEAVKKVIASMTVG

SEQ ID NO: 18621 - protein, 12 aa, Artificial
  helical interface sequence
FVIIYELLDELM

SEQ ID NO: 18622 - protein, 6 aa, Artificial
  helical interface sequence
AKLHDI

SEQ ID NO: 18623 - protein, 32 aa, Artificial
  helical interface sequence
EAYQGVQQKWDATATELNNALQNLARTISEAG

SEQ ID NO: 18624 - protein, 10 aa, Artificial
  helical interface sequence
FINIAQMSAC

SEQ ID NO: 18625 - protein, 12 aa, Artificial
  helical interface sequence
MGLTAEMLGKMH

SEQ ID NO: 18626 - protein, 19 aa, Artificial
  helical interface sequence
ELFDQCENKRRTLFKLASE

SEQ ID NO: 18627 - protein, 11 aa, Artificial
  helical interface sequence
ALDLAKGLLEL

SEQ ID NO: 18628 - protein, 25 aa, Artificial
  helical interface sequence
LEGLKKAAALAVLNARYLKELLKEK

SEQ ID NO: 18629 - protein, 14 aa, Artificial
  helical interface sequence
ENDIKNAINLMFWG

SEQ ID NO: 18630 - protein, 8 aa, Artificial
  helical interface sequence
TQMQRLTK

SEQ ID NO: 18631 - protein, 16 aa, Artificial
  helical interface sequence
LLEDAIEVCKKFMERD

SEQ ID NO: 18632 - protein, 15 aa, Artificial
  helical interface sequence
LLEDAIEVCKKFMER

SEQ ID NO: 18633 - protein, 9 aa, Artificial
  helical interface sequence
QKEWDKVVN

SEQ ID NO: 18634 - protein, 10 aa, Artificial
  helical interface sequence
YEEFVQMMTA

SEQ ID NO: 18635 - protein, 13 aa, Artificial
  helical interface sequence
SAEFIKNLSSIRR

SEQ ID NO: 18636 - protein, 13 aa, Artificial
  helical interface sequence
SEEEIREAFRVFD

SEQ ID NO: 18637 - protein, 7 aa, Artificial
  helical interface sequence
GYLSDYY

SEQ ID NO: 18638 - protein, 12 aa, Artificial
  helical interface sequence
TASVNCAKKIVS

SEQ ID NO: 18639 - protein, 12 aa, Artificial
  helical interface sequence
RDDLKKLLETES

SEQ ID NO: 18640 - protein, 14 aa, Artificial
  helical interface sequence
VTLLRSLMQQALAW

SEQ ID NO: 18641 - protein, 25 aa, Artificial
  helical interface sequence
LYAKLMGLLADLRSINNAYSYELQR

SEQ ID NO: 18642 - protein, 9 aa, Artificial
  helical interface sequence
HMNVLLAEA

SEQ ID NO: 18643 - protein, 16 aa, Artificial
  helical interface sequence
VLENHHLAVGFKLLQE

SEQ ID NO: 18644 - protein, 8 aa, Artificial
  helical interface sequence
INQLVRKG

SEQ ID NO: 18645 - protein, 19 aa, Artificial
  helical interface sequence
PEVHISYDKFFSALARALA

SEQ ID NO: 18646 - protein, 11 aa, Artificial
  helical interface sequence
DLLLRIEHYLQ

SEQ ID NO: 18647 - protein, 21 aa, Artificial
  helical interface sequence
PSRLQAILGDVCHIREQLMSV

SEQ ID NO: 18648 - protein, 14 aa, Artificial
  helical interface sequence
RMHESMKLFDSICN

SEQ ID NO: 18649 - protein, 19 aa, Artificial
  helical interface sequence
PVNFKLLSHCLLSTLAVHL

SEQ ID NO: 18650 - protein, 15 aa, Artificial
  helical interface sequence
EEVGGEALGRLLVVY

SEQ ID NO: 18651 - protein, 23 aa, Artificial
  helical interface sequence
VGDAQVLVRYMKAELELYRLQRR

SEQ ID NO: 18652 - protein, 13 aa, Artificial
  helical interface sequence
FQVEYAREAVKKG

SEQ ID NO: 18653 - protein, 5 aa, Artificial
  helical interface sequence
TTFQQ

SEQ ID NO: 18654 - protein, 9 aa, Artificial
  helical interface sequence
FPDFVHAVK

SEQ ID NO: 18655 - protein, 6 aa, Artificial
  helical interface sequence
SEQLTS

SEQ ID NO: 18656 - protein, 26 aa, Artificial
  helical interface sequence
YLFTAIVGAMGWGLIFYPGNWPIIAP

SEQ ID NO: 18657 - protein, 16 aa, Artificial
  helical interface sequence
PDAWASCLAGIAAAIS

SEQ ID NO: 18658 - protein, 15 aa, Artificial
  helical interface sequence
DAAAAIVQAQWEDVW

SEQ ID NO: 18659 - protein, 16 aa, Artificial
  helical interface sequence
PDAWASCLAGIAAAIS

SEQ ID NO: 18660 - protein, 16 aa, Artificial
  helical interface sequence
PDAWSRCFNRITTGMT

SEQ ID NO: 18661 - protein, 19 aa, Artificial
  helical interface sequence
AASRVSAGEEVFAALFKMV

SEQ ID NO: 18662 - protein, 15 aa, Artificial
  helical interface sequence
PLQRLKVKRQWAEAY

SEQ ID NO: 18663 - protein, 17 aa, Artificial
  helical interface sequence
PATLNEQLSHLATQHKA

SEQ ID NO: 18664 - protein, 6 aa, Artificial
  helical interface sequence
SEQLTS

SEQ ID NO: 18665 - protein, 20 aa, Artificial
  helical interface sequence
KRDFRRLWIQRINAGARLHG

SEQ ID NO: 18666 - protein, 9 aa, Artificial
  helical interface sequence
KADVERLRK

SEQ ID NO: 18667 - protein, 6 aa, Artificial
  helical interface sequence
VRAVAA

SEQ ID NO: 18668 - protein, 13 aa, Artificial
  helical interface sequence
ESFRVLVKELQAL

SEQ ID NO: 18669 - protein, 8 aa, Artificial
  helical interface sequence
RTLKAIEE

SEQ ID NO: 18670 - protein, 34 aa, Artificial
  helical interface sequence
SGKYIKLQNVYREKAKKDAAAVGNHVAKLLQSIG

SEQ ID NO: 18671 - protein, 6 aa, Artificial
  helical interface sequence
PSYWWN

SEQ ID NO: 18672 - protein, 12 aa, Artificial
  helical interface sequence
DEEVDEMIREAD

SEQ ID NO: 18673 - protein, 16 aa, Artificial
  helical interface sequence
GATAGLQLAKNHVALH

SEQ ID NO: 18674 - protein, 24 aa, Artificial
  helical interface sequence
GPLSNETYIQSFAQVWDEHKKRTG

SEQ ID NO: 18675 - protein, 12 aa, Artificial
  helical interface sequence
EEDIEDLMKDSD

SEQ ID NO: 18676 - protein, 8 aa, Artificial
  helical interface sequence
FDEFLKMM

SEQ ID NO: 18677 - protein, 10 aa, Artificial
  helical interface sequence
HGTHVAGTVA

SEQ ID NO: 18678 - protein, 6 aa, Artificial
  helical interface sequence
SEELET

SEQ ID NO: 18679 - protein, 7 aa, Artificial
  helical interface sequence
LKRAAVE

SEQ ID NO: 18680 - protein, 6 aa, Artificial
  helical interface sequence
SEQLTS

SEQ ID NO: 18681 - protein, 35 aa, Artificial; identical to SEQ ID NO: 5251
  helical interface sequence

SEQ ID NO: 18682 - protein, 35 aa, Artificial; identical to SEQ ID NO: 5251
  helical interface sequence

SEQ ID NO: 18683 - protein, 35 aa, Artificial; identical to SEQ ID NO: 5251
  helical interface sequence

SEQ ID NO: 18684 - protein, 35 aa, Artificial; identical to SEQ ID NO: 5251
  helical interface sequence

SEQ ID NO: 18685 - protein, 35 aa, Artificial; identical to SEQ ID NO: 5251
  helical interface sequence

SEQ ID NO: 18686 - protein, 35 aa, Artificial; identical to SEQ ID NO: 5251
  helical interface sequence

SEQ ID NO: 18687 - protein, 35 aa, Artificial; identical to SEQ ID NO: 5251
  helical interface sequence

SEQ ID NO: 18688 - protein, 35 aa, Artificial; identical to SEQ ID NO: 5251
  helical interface sequence

SEQ ID NO: 18689 - protein, 13 aa, Artificial
  helical interface sequence
EALGEFIFDKKLL

SEQ ID NO: 18690 - protein, 35 aa, Artificial; identical to SEQ ID NO: 5251
  helical interface sequence

SEQ ID NO: 18691 - protein, 35 aa, Artificial; identical to SEQ ID NO: 5251
  helical interface sequence

SEQ ID NO: 18692 - protein, 16 aa, Artificial
  helical interface sequence
LSLALYVFDEYLQKTV

SEQ ID NO: 18693 - protein, 35 aa, Artificial; identical to SEQ ID NO: 5251
  helical interface sequence

SEQ ID NO: 18694 - protein, 16 aa, Artificial
  helical interface sequence
LSLALYVFDEYLQKTV

SEQ ID NO: 18695 - protein, 35 aa, Artificial; identical to SEQ ID NO: 5251
  helical interface sequence

SEQ ID NO: 18696 - protein, 22 aa, Artificial
  helical interface sequence
AADTQAIADIVQYHLELYTSQY

SEQ ID NO: 18697 - protein, 20 aa, Artificial
  helical interface sequence
ISDMQHIERLLKDLVTENAY

SEQ ID NO: 18698 - protein, 18 aa, Artificial
  helical interface sequence
VEEVIKLVRDSFTSATER

SEQ ID NO: 18699 - protein, 18 aa, Artificial
  helical interface sequence
VEEVIKLVRDSFTSATER

SEQ ID NO: 18700 - protein, 23 aa, Artificial
  helical interface sequence
AGDTVQFAEYIQANIQLYSIRED

SEQ ID NO: 18701 - protein, 15 aa, Artificial
  helical interface sequence
IPAFADRLGQYVQAH

SEQ ID NO: 18702 - protein, 13 aa, Artificial
  helical interface sequence
FQVEYSLEAIKLG

SEQ ID NO: 18703 - protein, 10 aa, Artificial
  helical interface sequence
RAKKFQRQHM

SEQ ID NO: 18704 - protein, 10 aa, Artificial
  helical interface sequence
PRHLQLAVRN

SEQ ID NO: 18705 - protein, 10 aa, Artificial
  helical interface sequence
KICLEQREVW

SEQ ID NO: 18706 - protein, 22 aa, Artificial
  helical interface sequence
FGLLCRMADQTFISIVDWARRC

SEQ ID NO: 18707 - protein, 20 aa, Artificial
  helical interface sequence
GALANIAVDKANLEIMTKRS

SEQ ID NO: 18708 - protein, 12 aa, Artificial
  helical interface sequence
AMDVVYALKRQG

SEQ ID NO: 18709 - protein, 12 aa, Artificial
  helical interface sequence
AIYVYKVLKQVH

SEQ ID NO: 18710 - protein, 16 aa, Artificial
  helical interface sequence
EAEFVQLLKEIEKENV

SEQ ID NO: 18711 - protein, 16 aa, Artificial
  helical interface sequence
EAEFVQLLKEIEKENV

SEQ ID NO: 18712 - protein, 27 aa, Artificial
  helical interface sequence
RDFLYHATAATGVVVTGAAVWPLINQM

SEQ ID NO: 18713 - protein, 7 aa, Artificial
  helical interface sequence
HLARKAF

SEQ ID NO: 18714 - protein, 19 aa, Artificial
  helical interface sequence
MESFAATADFREQILRVKE

SEQ ID NO: 18715 - protein, 15 aa, Artificial
  helical interface sequence
REKVEVQLPELFHKI

SEQ ID NO: 18716 - protein, 5 aa, Artificial
  helical interface sequence
LFFFK

SEQ ID NO: 18717 - protein, 5 aa, Artificial
  helical interface sequence
HTVSA

SEQ ID NO: 18718 - protein, 5 aa, Artificial
  helical interface sequence
INRLC

SEQ ID NO: 18719 - protein, 5 aa, Artificial
  helical interface sequence
SEQLT

SEQ ID NO: 18720 - protein, 8 aa, Artificial
  helical interface sequence
QSKYLMMY

SEQ ID NO: 18721 - protein, 13 aa, Artificial
  helical interface sequence
LKKLKESYCQRQG

SEQ ID NO: 18722 - protein, 17 aa, Artificial
  helical interface sequence
NGVDAVIKAYRLYLEQC

SEQ ID NO: 18723 - protein, 28 aa, Artificial
  helical interface sequence
GLWTFIALHGAFGLIGFMLRQFEIARLV

SEQ ID NO: 18724 - protein, 12 aa, Artificial
  helical interface sequence
FFGHIWHGARTL

SEQ ID NO: 18725 - protein, 7 aa, Artificial
  helical interface sequence
QRLYKAL

SEQ ID NO: 18726 - protein, 7 aa, Artificial
  helical interface sequence
QRLYKAL

SEQ ID NO: 18727 - protein, 21 aa, Artificial
  helical interface sequence
ETITYVFIFACIIALFFFAIF

SEQ ID NO: 18728 - protein, 6 aa, Artificial
  helical interface sequence
LNKIKN

SEQ ID NO: 18729 - protein, 10 aa, Artificial
  helical interface sequence
ISQEIRAAED

SEQ ID NO: 18730 - protein, 21 aa, Artificial
  helical interface sequence
FYTKNLLLNEGIRAWMAPQDQ

SEQ ID NO: 18731 - protein, 21 aa, Artificial
  helical interface sequence
FYTKNLLLNEGIRAWMAPQDQ

SEQ ID NO: 18732 - protein, 9 aa, Artificial
  helical interface sequence
DIEVLKRMG

SEQ ID NO: 18733 - protein, 12 aa, Artificial
  helical interface sequence
TSEKFQKINQMV

SEQ ID NO: 18734 - protein, 9 aa, Artificial
  helical interface sequence
NVKQMVMAG

SEQ ID NO: 18735 - protein, 17 aa, Artificial
  helical interface sequence
DYAVRLREKQKLRRIYG

SEQ ID NO: 18736 - protein, 7 aa, Artificial
  helical interface sequence
ATIQKKF

SEQ ID NO: 18737 - protein, 30 aa, Artificial; identical to SEQ ID NO: 4916
  helical interface sequence

SEQ ID NO: 18738 - protein, 12 aa, Artificial
  helical interface sequence
EAELQDMINEVD

SEQ ID NO: 18739 - protein, 10 aa, Artificial
  helical interface sequence
EIREAFRVFD

SEQ ID NO: 18740 - protein, 7 aa, Artificial
  helical interface sequence
AARLASE

SEQ ID NO: 18741 - protein, 12 aa, Artificial
  helical interface sequence
KGLLLHTLDLLK

SEQ ID NO: 18742 - protein, 22 aa, Artificial
  helical interface sequence
ADMIPDLMAFGAAKQEKLAKEI

SEQ ID NO: 18743 - protein, 29 aa, Artificial
  helical interface sequence
PEYWDGETRKVKAHSQTHRVDLGTLRGYY

SEQ ID NO: 18744 - protein, 13 aa, Artificial
  helical interface sequence
IIKKESIVSLFEK

SEQ ID NO: 18745 - protein, 13 aa, Artificial
  helical interface sequence
IIKKESIVSLFEK

SEQ ID NO: 18746 - protein, 9 aa, Artificial
  helical interface sequence
LRELLTNLV

SEQ ID NO: 18747 - protein, 17 aa, Artificial
  helical interface sequence
EPIYRIYNRLQGYIEAV

SEQ ID NO: 18748 - protein, 9 aa, Artificial
  helical interface sequence
GPMDEYLIA

SEQ ID NO: 18749 - protein, 27 aa, Artificial
  helical interface sequence
NEVLFLMTKCTELFVRHLAGAAYTEEF

SEQ ID NO: 18750 - protein, 11 aa, Artificial
  helical interface sequence
AKDILQTLTEL

SEQ ID NO: 18751 - protein, 6 aa, Artificial
  helical interface sequence
PRCAWR

SEQ ID NO: 18752 - protein, 15 aa, Artificial
  helical interface sequence
RNFRLLEELEEGQKG

SEQ ID NO: 18753 - protein, 17 aa, Artificial
  helical interface sequence
NSEVHMLLEHRKQQNES

SEQ ID NO: 18754 - protein, 10 aa, Artificial
  helical interface sequence
TGPLDDYVVA

SEQ ID NO: 18755 - protein, 15 aa, Artificial
  helical interface sequence
KKQVLRMEHLVLKVL

SEQ ID NO: 18756 - protein, 8 aa, Artificial
  helical interface sequence
EAEISHTQ

SEQ ID NO: 18757 - protein, 18 aa, Artificial
  helical interface sequence
PEYQQDLDRELFKLKQMY

SEQ ID NO: 18758 - protein, 9 aa, Artificial
  helical interface sequence
ERRATLRKL

SEQ ID NO: 18759 - protein, 11 aa, Artificial
  helical interface sequence
KEAYELAKEWF

SEQ ID NO: 18760 - protein, 7 aa, Artificial
  helical interface sequence
AASLRER

SEQ ID NO: 18761 - protein, 11 aa, Artificial
  helical interface sequence
PDTLKLLEAKG

SEQ ID NO: 18762 - protein, 10 aa, Artificial
  helical interface sequence
PNYRRRLVRW

SEQ ID NO: 18763 - protein, 6 aa, Artificial
  helical interface sequence
AEDEAF

SEQ ID NO: 18764 - protein, 8 aa, Artificial
  helical interface sequence
PRQVLAEF

SEQ ID NO: 18765 - protein, 10 aa, Artificial
  helical interface sequence
PNYRRRLVRW

SEQ ID NO: 18766 - protein, 25 aa, Artificial
  helical interface sequence
LEEKIRWLRAFREERKMVQEDEKIG

SEQ ID NO: 18767 - protein, 27 aa, Artificial
  helical interface sequence
QDGFWIYSEYCNNHLDACMELSKLMKD

SEQ ID NO: 18768 - protein, 10 aa, Artificial
  helical interface sequence
EAELQDMINE

SEQ ID NO: 18769 - protein, 10 aa, Artificial
  helical interface sequence
YEEFVQMMTA

SEQ ID NO: 18770 - protein, 15 aa, Artificial
  helical interface sequence
EEQKQEIYEAFSLFD

SEQ ID NO: 18771 - protein, 7 aa, Artificial
  helical interface sequence
YHELKVA

SEQ ID NO: 18772 - protein, 13 aa, Artificial
  helical interface sequence
PALRQCCNQLRQV

SEQ ID NO: 18773 - protein, 8 aa, Artificial
  helical interface sequence
PRQVLAEF

SEQ ID NO: 18774 - protein, 9 aa, Artificial
  helical interface sequence
AEERRRKQN

SEQ ID NO: 18775 - protein, 9 aa, Artificial
  helical interface sequence
AEERRRKQN

SEQ ID NO: 18776 - protein, 8 aa, Artificial
  helical interface sequence
PRQVLAEF

SEQ ID NO: 18777 - protein, 6 aa, Artificial
  helical interface sequence
AEDEAF

SEQ ID NO: 18778 - protein, 16 aa, Artificial
  helical interface sequence
YYGRWLLTAARILVDK

SEQ ID NO: 18779 - protein, 9 aa, Artificial
  helical interface sequence
AEERRRKQN

SEQ ID NO: 18780 - protein, 8 aa, Artificial
  helical interface sequence
PLHRAASV

SEQ ID NO: 18781 - protein, 10 aa, Artificial
  helical interface sequence
QSDLEEAYAT

SEQ ID NO: 18782 - protein, 5 aa, Artificial
  helical interface sequence
VEQKM

SEQ ID NO: 18783 - protein, 9 aa, Artificial
  helical interface sequence
ATELVQACR

SEQ ID NO: 18784 - protein, 22 aa, Artificial
  helical interface sequence
CLGGITLTCFLIQFATGFAMTF

SEQ ID NO: 18785 - protein, 12 aa, Artificial
  helical interface sequence
SRMLPETLAKDL

SEQ ID NO: 18786 - protein, 6 aa, Artificial
  helical interface sequence
FSSLRF

SEQ ID NO: 18787 - protein, 19 aa, Artificial
  helical interface sequence
AQEFAADVRLMFSNCYKYN

SEQ ID NO: 18788 - protein, 11 aa, Artificial
  helical interface sequence
YMELTKLLLNH

SEQ ID NO: 18789 - protein, 10 aa, Artificial
  helical interface sequence
GTFLTQALNH

SEQ ID NO: 18790 - protein, 5 aa, Artificial
  helical interface sequence
MLKEC

SEQ ID NO: 18791 - protein, 22 aa, Artificial
  helical interface sequence
LRINKRILALCMGNHELYMRRR

SEQ ID NO: 18792 - protein, 10 aa, Artificial
  helical interface sequence
PAAERLMQEK

SEQ ID NO: 18793 - protein, 6 aa, Artificial
  helical interface sequence
LTDLAL

SEQ ID NO: 18794 - protein, 17 aa, Artificial
  helical interface sequence
RGEQLLAYVKQVLAATG

SEQ ID NO: 18795 - protein, 10 aa, Artificial
  helical interface sequence
KEDALKLVQL

SEQ ID NO: 18796 - protein, 7 aa, Artificial
  helical interface sequence
ARNILEK

SEQ ID NO: 18797 - protein, 7 aa, Artificial
  helical interface sequence
CEDIARV

SEQ ID NO: 18798 - protein, 7 aa, Artificial
  helical interface sequence
KEDALKL

SEQ ID NO: 18799 - protein, 6 aa, Artificial
  helical interface sequence
ARNILE

SEQ ID NO: 18800 - protein, 7 aa, Artificial
  helical interface sequence
AHDIKQL

SEQ ID NO: 18801 - protein, 26 aa, Artificial
  helical interface sequence
TDLVETLELQNLMLCALQTIYGAEAR

SEQ ID NO: 18802 - protein, 6 aa, Artificial
  helical interface sequence
NCTRTC

SEQ ID NO: 18803 - protein, 7 aa, Artificial
  helical interface sequence
WIQYKEG

SEQ ID NO: 18804 - protein, 7 aa, Artificial
  helical interface sequence
QLLQKNV

SEQ ID NO: 18805 - protein, 23 aa, Artificial
  helical interface sequence
KESTQKAIDGVTNKVNSIIDKMN

SEQ ID NO: 18806 - protein, 22 aa, Artificial
  helical interface sequence
ESTQKAIDGVTNKVNSIIDKMN

SEQ ID NO: 18807 - protein, 26 aa, Artificial
  helical interface sequence
PAIGIPALLGSVTVIAILVHLAILSH

SEQ ID NO: 18808 - protein, 26 aa, Artificial
  helical interface sequence
PAIGIPALLGSVTVIAILVHLAILSH

SEQ ID NO: 18809 - protein, 25 aa, Artificial
  helical interface sequence
PAIGIPALLGSVTVIAILVHLAILS

SEQ ID NO: 18810 - protein, 9 aa, Artificial
  helical interface sequence
TWFPAYWQG

SEQ ID NO: 18811 - protein, 9 aa, Artificial
  helical interface sequence
TWFPAYWQG

SEQ ID NO: 18812 - protein, 26 aa, Artificial
  helical interface sequence
PAIGIPALLGSVTVIAILVHLAILSH

SEQ ID NO: 18813 - protein, 31 aa, Artificial; identical to SEQ ID NO: 4418
  helical interface sequence

SEQ ID NO: 18814 - protein, 9 aa, Artificial
  helical interface sequence
ETALMNSLE

SEQ ID NO: 18815 - protein, 6 aa, Artificial
  helical interface sequence
FEKTME

SEQ ID NO: 18816 - protein, 6 aa, Artificial
  helical interface sequence
LCAAAC

SEQ ID NO: 18817 - protein, 16 aa, Artificial
  helical interface sequence
RRAAIMPLLRRVQQEE

SEQ ID NO: 18818 - protein, 9 aa, Artificial
  helical interface sequence
YLQNITYTP

SEQ ID NO: 18819 - protein, 11 aa, Artificial
  helical interface sequence
EREVYDLFGIV

SEQ ID NO: 18820 - protein, 7 aa, Artificial
  helical interface sequence
KPQRREA

SEQ ID NO: 18821 - protein, 23 aa, Artificial
  helical interface sequence
YATAGAGAVATGAAVWPLINQMN

SEQ ID NO: 18822 - protein, 6 aa, Artificial
  helical interface sequence
ISQLFN

SEQ ID NO: 18823 - protein, 23 aa, Artificial
  helical interface sequence
YATAGAGAVATGAAVWPLINQMN

SEQ ID NO: 18824 - protein, 28 aa, Artificial
  helical interface sequence
LMARKQAGFTAVMFLTVLSVLLYLTNKR

SEQ ID NO: 18825 - protein, 17 aa, Artificial
  helical interface sequence
QMSFWGATVITGLFGAI

SEQ ID NO: 18826 - protein, 23 aa, Artificial
  helical interface sequence
YATAGAGAVATGAAVWPLINQMN

SEQ ID NO: 18827 - protein, 7 aa, Artificial
  helical interface sequence
IEEDFNA

SEQ ID NO: 18828 - protein, 6 aa, Artificial
  helical interface sequence
APMTTA

SEQ ID NO: 18829 - protein, 7 aa, Artificial
  helical interface sequence
SEQLTSG

SEQ ID NO: 18830 - protein, 10 aa, Artificial
  helical interface sequence
ADSIKEIIED

SEQ ID NO: 18831 - protein, 24 aa, Artificial
  helical interface sequence
DATIKKEQKLIQAQNLVREFEKTH

SEQ ID NO: 18832 - protein, 18 aa, Artificial
  helical interface sequence
KVKKMVLQERIDNVLKQG

SEQ ID NO: 18833 - protein, 16 aa, Artificial
  helical interface sequence
VTESLKVKLQWASAFG

SEQ ID NO: 18834 - protein, 15 aa, Artificial
  helical interface sequence
FDDFRKAVWEEVSKD

SEQ ID NO: 18835 - protein, 8 aa, Artificial
  helical interface sequence
KTCIVRYL

SEQ ID NO: 18836 - protein, 5 aa, Artificial
  helical interface sequence
PHHER

SEQ ID NO: 18837 - protein, 12 aa, Artificial
  helical interface sequence
GIALLLMLIWYR

SEQ ID NO: 18838 - protein, 8 aa, Artificial
  helical interface sequence
KERLDKEF

SEQ ID NO: 18839 - protein, 7 aa, Artificial
  helical interface sequence
WKERLDK

SEQ ID NO: 18840 - protein, 14 aa, Artificial
  helical interface sequence
LSVYQKMKFNVAMG

SEQ ID NO: 18841 - protein, 11 aa, Artificial
  helical interface sequence
PGRDRRTEEEN

SEQ ID NO: 18842 - protein, 9 aa, Artificial
  helical interface sequence
TNVISEPLR

SEQ ID NO: 18843 - protein, 9 aa, Artificial
  helical interface sequence
ERVVAWLDS

SEQ ID NO: 18844 - protein, 19 aa, Artificial
  helical interface sequence
HKNLLILYDAIGTLADSVG

SEQ ID NO: 18845 - protein, 9 aa, Artificial
  helical interface sequence
YERLSEWAD

SEQ ID NO: 18846 - protein, 18 aa, Artificial
  helical interface sequence
ELEKAMVALIDVFHQYSG

SEQ ID NO: 18847 - protein, 19 aa, Artificial
  helical interface sequence
GEQIAQLIAGYIDIILKKK

SEQ ID NO: 18848 - protein, 6 aa, Artificial
  helical interface sequence
DEQLKS

SEQ ID NO: 18849 - protein, 13 aa, Artificial
  helical interface sequence
PQTREHILLGRQV

SEQ ID NO: 18850 - protein, 7 aa, Artificial
  helical interface sequence
DEQLKSG

SEQ ID NO: 18851 - protein, 21 aa, Artificial
  helical interface sequence
VELEKLVREKKRELMELRFQA

SEQ ID NO: 18852 - protein, 18 aa, Artificial
  helical interface sequence
GKEQRILAKTIKRARILG

SEQ ID NO: 18853 - protein, 13 aa, Artificial
  helical interface sequence
YSIYVYKVLKQVH

SEQ ID NO: 18854 - protein, 7 aa, Artificial
  helical interface sequence
AELFYKG

SEQ ID NO: 18855 - protein, 15 aa, Artificial
  helical interface sequence
IFRFTQAGSEVSALL

SEQ ID NO: 18856 - protein, 15 aa, Artificial
  helical interface sequence
IFRFTQAGSEVSALL

SEQ ID NO: 18857 - protein, 5 aa, Artificial
  helical interface sequence
EVFTG

SEQ ID NO: 18858 - protein, 18 aa, Artificial
  helical interface sequence
EQDKLTVERARKIQRFLS

SEQ ID NO: 18859 - protein, 5 aa, Artificial
  helical interface sequence
EVFTG

SEQ ID NO: 18860 - protein, 5 aa, Artificial
  helical interface sequence
RGISE

SEQ ID NO: 18861 - protein, 14 aa, Artificial
  helical interface sequence
RSTVAQLVQTLEQH

SEQ ID NO: 18862 - protein, 38 aa, Artificial
  helical interface sequence
LKEVEMRLKSIKNIEKITKTMKIVASTRLSKAEKAKIS

SEQ ID NO: 18863 - protein, 5 aa, Artificial
  helical interface sequence
SEQLT

SEQ ID NO: 18864 - protein, 11 aa, Artificial
  helical interface sequence
AAELRHVMTNL

SEQ ID NO: 18865 - protein, 27 aa, Artificial
  helical interface sequence
IYEETRGVLKVFLENVIRDAVTYTEHA

SEQ ID NO: 18866 - protein, 8 aa, Artificial
  helical interface sequence
AITSAYYR

SEQ ID NO: 18867 - protein, 16 aa, Artificial
  helical interface sequence
IYAWEALEVVLIGAAF

SEQ ID NO: 18868 - protein, 11 aa, Artificial
  helical interface sequence
SARVSELMNES

SEQ ID NO: 18869 - protein, 8 aa, Artificial
  helical interface sequence
VAAAQRRG

SEQ ID NO: 18870 - protein, 8 aa, Artificial
  helical interface sequence
AEEFVQQR

SEQ ID NO: 18871 - protein, 9 aa, Artificial
  helical interface sequence
VSSLMNGLG

SEQ ID NO: 18872 - protein, 6 aa, Artificial
  helical interface sequence
LIVELY

SEQ ID NO: 18873 - protein, 9 aa, Artificial
  helical interface sequence
STYAHYLFN

SEQ ID NO: 18874 - protein, 12 aa, Artificial
  helical interface sequence
EDTFKQIYAQFF

SEQ ID NO: 18875 - protein, 5 aa, Artificial
  helical interface sequence
LDILT

SEQ ID NO: 18876 - protein, 8 aa, Artificial
  helical interface sequence
EASLKKVL

SEQ ID NO: 18877 - protein, 8 aa, Artificial
  helical interface sequence
EASLKKVL

SEQ ID NO: 18878 - protein, 5 aa, Artificial
  helical interface sequence
FNLIY

SEQ ID NO: 18879 - protein, 12 aa, Artificial
  helical interface sequence
SLETVVANSAFI

SEQ ID NO: 18880 - protein, 14 aa, Artificial
  helical interface sequence
YAIREAATSNLKKL

SEQ ID NO: 18881 - protein, 9 aa, Artificial
  helical interface sequence
GFYDECLRK

SEQ ID NO: 18882 - protein, 16 aa, Artificial
  helical interface sequence
SPKEVMFLNELEEILD

SEQ ID NO: 18883 - protein, 8 aa, Artificial
  helical interface sequence
EAEISHTQ

SEQ ID NO: 18884 - protein, 21 aa, Artificial
  helical interface sequence
QGALANIAVDKANLEIMTKRS

SEQ ID NO: 18885 - protein, 17 aa, Artificial
  helical interface sequence
KAKEVSSALSKVLSKID

SEQ ID NO: 18886 - protein, 22 aa, Artificial
  helical interface sequence
KESTQKAIDGVTNKVNSIIDKM

SEQ ID NO: 18887 - protein, 10 aa, Artificial
  helical interface sequence
YEELKHLLSR

SEQ ID NO: 18888 - protein, 5 aa, Artificial
  helical interface sequence
AGIKT

SEQ ID NO: 18889 - protein, 20 aa, Artificial
  helical interface sequence
EDESYARAYRIIRAHQTELT

SEQ ID NO: 18890 - protein, 7 aa, Artificial
  helical interface sequence
EEFGRFA

SEQ ID NO: 18891 - protein, 17 aa, Artificial
  helical interface sequence
RTYFMERLRHYRQLSLQ

SEQ ID NO: 18892 - protein, 9 aa, Artificial
  helical interface sequence
ADEFMDYIR

SEQ ID NO: 18893 - protein, 18 aa, Artificial
  helical interface sequence
RTYFMERLRHYRQLSLQL

SEQ ID NO: 18894 - protein, 5 aa, Artificial
  helical interface sequence
KKDIF

SEQ ID NO: 18895 - protein, 5 aa, Artificial
  helical interface sequence
TTVSQ

SEQ ID NO: 18896 - protein, 8 aa, Artificial
  helical interface sequence
KLVEDTLV

SEQ ID NO: 18897 - protein, 19 aa, Artificial
  helical interface sequence
TFDKYYRPRYEYLAKEAAA

SEQ ID NO: 18898 - protein, 5 aa, Artificial
  helical interface sequence
KKDIF

SEQ ID NO: 18899 - protein, 8 aa, Artificial
  helical interface sequence
GPHMHDRV

SEQ ID NO: 18900 - protein, 11 aa, Artificial
  helical interface sequence
QPMRKLVEDTL

SEQ ID NO: 18901 - protein, 15 aa, Artificial
  helical interface sequence
KSVMEELKRIIDDSE

SEQ ID NO: 18902 - protein, 16 aa, Artificial
  helical interface sequence
NCAAFTGGIVEAILTH

SEQ ID NO: 18903 - protein, 7 aa, Artificial
  helical interface sequence
RPLWRHY

SEQ ID NO: 18904 - protein, 15 aa, Artificial
  helical interface sequence
RDDMLAWIKTIQESS

SEQ ID NO: 18905 - protein, 6 aa, Artificial
  helical interface sequence
RPLWRH

SEQ ID NO: 18906 - protein, 5 aa, Artificial
  helical interface sequence
RNEMR

SEQ ID NO: 18907 - protein, 6 aa, Artificial
  helical interface sequence
CADCHM

SEQ ID NO: 18908 - protein, 13 aa, Artificial
  helical interface sequence
VALATVAFGMKYT

SEQ ID NO: 18909 - protein, 5 aa, Artificial
  helical interface sequence
RNEMR

SEQ ID NO: 18910 - protein, 14 aa, Artificial
  helical interface sequence
PSLRNIYAELHRSL

SEQ ID NO: 18911 - protein, 9 aa, Artificial
  helical interface sequence
YVVRLAKYT

SEQ ID NO: 18912 - protein, 16 aa, Artificial
  helical interface sequence
CTLQFESAWVLTNIAS

SEQ ID NO: 18913 - protein, 9 aa, Artificial
  helical interface sequence
MPWVQQILE

SEQ ID NO: 18914 - protein, 12 aa, Artificial
  helical interface sequence
VFYLHSRLLERA

SEQ ID NO: 18915 - protein, 21 aa, Artificial
  helical interface sequence
PGARARVALTGLTVAEYFRDQ

SEQ ID NO: 18916 - protein, 12 aa, Artificial
  helical interface sequence
LATDMGTMQERI

SEQ ID NO: 18917 - protein, 27 aa, Artificial
  helical interface sequence
SEHYDVARGVQKILQDYKSLQDIIAIL

SEQ ID NO: 18918 - protein, 28 aa, Artificial
  helical interface sequence
SEHYDVARGVQKILQDYKSLQDIIAILG

SEQ ID NO: 18919 - protein, 19 aa, Artificial
  helical interface sequence
LLEEDKICGYVAGGLMYAA

SEQ ID NO: 18920 - protein, 15 aa, Artificial
  helical interface sequence
IWTHLDWVSNTGYTY

SEQ ID NO: 18921 - protein, 15 aa, Artificial
  helical interface sequence
LPEKLTAFKEKYMEF

SEQ ID NO: 18922 - protein, 14 aa, Artificial
  helical interface sequence
IYVKLEKLDIMIRL

SEQ ID NO: 18923 - protein, 13 aa, Artificial
  helical interface sequence
PLIRALAVRTMGC

SEQ ID NO: 18924 - protein, 14 aa, Artificial
  helical interface sequence
ENLVKVGGYILGEF

SEQ ID NO: 18925 - protein, 8 aa, Artificial
  helical interface sequence
EAHKNRKL

SEQ ID NO: 18926 - protein, 8 aa, Artificial
  helical interface sequence
PFYAQYNY

SEQ ID NO: 18927 - protein, 13 aa, Artificial
  helical interface sequence
AEEWKKKYEKEKE

SEQ ID NO: 18928 - protein, 7 aa, Artificial
  helical interface sequence
AAITLKA

SEQ ID NO: 18929 - protein, 18 aa, Artificial
  helical interface sequence
PESIFEMMETGKRVGKVL

SEQ ID NO: 18930 - protein, 11 aa, Artificial
  helical interface sequence
PRVLRELVPIV

SEQ ID NO: 18931 - protein, 5 aa, Artificial
  helical interface sequence
WEKFG

SEQ ID NO: 18932 - protein, 19 aa, Artificial
  helical interface sequence
KRQGALELIKKGYTQQLAF

SEQ ID NO: 18933 - protein, 16 aa, Artificial
  helical interface sequence
YEKKKLQRQIDLVLKY

SEQ ID NO: 18934 - protein, 14 aa, Artificial
  helical interface sequence
ANVRFNVAKSLQKI

SEQ ID NO: 18935 - protein, 8 aa, Artificial
  helical interface sequence
FYDECLRK

SEQ ID NO: 18936 - protein, 6 aa, Artificial
  helical interface sequence
RSNRAG

SEQ ID NO: 18937 - protein, 14 aa, Artificial
  helical interface sequence
SDGFKSAISEVSTV

SEQ ID NO: 18938 - protein, 11 aa, Artificial
  helical interface sequence
KTCMLISYTSN

SEQ ID NO: 18939 - protein, 6 aa, Artificial
  helical interface sequence
EEQERE

SEQ ID NO: 18940 - protein, 11 aa, Artificial
  helical interface sequence
PTIVEEVMNAV

SEQ ID NO: 18941 - protein, 10 aa, Artificial
  helical interface sequence
YRLTQGVVKR

SEQ ID NO: 18942 - protein, 13 aa, Artificial
  helical interface sequence
LCVEWLRRYLENG

SEQ ID NO: 18943 - protein, 11 aa, Artificial
  helical interface sequence
QKFVLQLLELF

SEQ ID NO: 18944 - protein, 10 aa, Artificial
  helical interface sequence
WRVRLAIIEY

SEQ ID NO: 18945 - protein, 5 aa, Artificial
  helical interface sequence
SPKEV

SEQ ID NO: 18946 - protein, 14 aa, Artificial
  helical interface sequence
ANVRFNVAKSLQKI

SEQ ID NO: 18947 - protein, 8 aa, Artificial
  helical interface sequence
HVDVFFQK

SEQ ID NO: 18948 - protein, 11 aa, Artificial
  helical interface sequence
AMDVVYALKRQ

SEQ ID NO: 18949 - protein, 8 aa, Artificial
  helical interface sequence
LLDRVLRH

SEQ ID NO: 18950 - protein, 11 aa, Artificial
  helical interface sequence
AAELRHVMTNL

SEQ ID NO: 18951 - protein, 8 aa, Artificial
  helical interface sequence
GIHVAELA

SEQ ID NO: 18952 - protein, 14 aa, Artificial
  helical interface sequence
EIAFGRYSDSLVQK

SEQ ID NO: 18953 - protein, 22 aa, Artificial
  helical interface sequence
GDSKVFYLKMKGDYHRYLAEFK

SEQ ID NO: 18954 - protein, 19 aa, Artificial
  helical interface sequence
PIRLGLALNFSVFYYEILN

SEQ ID NO: 18955 - protein, 12 aa, Artificial
  helical interface sequence
DEELQEMIDEAD

SEQ ID NO: 18956 - protein, 10 aa, Artificial
  helical interface sequence
KTCLLISYTT

SEQ ID NO: 18957 - protein, 11 aa, Artificial
  helical interface sequence
QTDIYRCKANH

SEQ ID NO: 18958 - protein, 6 aa, Artificial
  helical interface sequence
SEQLTS

SEQ ID NO: 18959 - protein, 5 aa, Artificial
  helical interface sequence
IVEQC

SEQ ID NO: 18960 - protein, 5 aa, Artificial
  helical interface sequence
IVEQC

SEQ ID NO: 18961 - protein, 19 aa, Artificial
  helical interface sequence
VNQHLCGSHLVEALYLVCG

SEQ ID NO: 18962 - protein, 7 aa, Artificial
  helical interface sequence
LYQLENY

SEQ ID NO: 18963 - protein, 12 aa, Artificial
  helical interface sequence
APTLIYERYLSE

SEQ ID NO: 18964 - protein, 6 aa, Artificial
  helical interface sequence
DEQLKS

SEQ ID NO: 18965 - protein, 11 aa, Artificial
  helical interface sequence
IEYIKDLLENM

SEQ ID NO: 18966 - protein, 5 aa, Artificial
  helical interface sequence
DEQLK

SEQ ID NO: 18967 - protein, 18 aa, Artificial
  helical interface sequence
PSQSANLLAEAKKLNDAQ

SEQ ID NO: 18968 - protein, 10 aa, Artificial
  helical interface sequence
KTCLLISYTT

SEQ ID NO: 18969 - protein, 10 aa, Artificial
  helical interface sequence
KTCLLISYTT

SEQ ID NO: 18970 - protein, 5 aa, Artificial
  helical interface sequence
AQIDV

SEQ ID NO: 18971 - protein, 5 aa, Artificial
  helical interface sequence
DSIRC

SEQ ID NO: 18972 - protein, 13 aa, Artificial
  helical interface sequence
WYIEALAQVFSER

SEQ ID NO: 18973 - protein, 6 aa, Artificial
  helical interface sequence
EGEFSE

SEQ ID NO: 18974 - protein, 6 aa, Artificial
  helical interface sequence
STIVRS

SEQ ID NO: 18975 - protein, 19 aa, Artificial
  helical interface sequence
PWILMSDDLSDLIHTNIYL

SEQ ID NO: 18976 - protein, 11 aa, Artificial
  helical interface sequence
KTLQQGIQLAQ

SEQ ID NO: 18977 - protein, 5 aa, Artificial
  helical interface sequence
LHQVA

SEQ ID NO: 18978 - protein, 9 aa, Artificial
  helical interface sequence
PMVRRAAAS

SEQ ID NO: 18979 - protein, 10 aa, Artificial
  helical interface sequence
PMVRRAAASK

SEQ ID NO: 18980 - protein, 15 aa, Artificial
  helical interface sequence
CHELNILENDFLKRV

SEQ ID NO: 18981 - protein, 9 aa, Artificial
  helical interface sequence
PMVRRAAAS

SEQ ID NO: 18982 - protein, 6 aa, Artificial
  helical interface sequence
WPECAK

SEQ ID NO: 18983 - protein, 18 aa, Artificial
  helical interface sequence
PMVRRAAASKLGEFAKVL

SEQ ID NO: 18984 - protein, 10 aa, Artificial
  helical interface sequence
VKSATHLLKY

SEQ ID NO: 18985 - protein, 6 aa, Artificial
  helical interface sequence
MERDCL

SEQ ID NO: 18986 - protein, 22 aa, Artificial
  helical interface sequence
PKDALLKAIENIRGMTSHYIDE

SEQ ID NO: 18987 - protein, 7 aa, Artificial
  helical interface sequence
ISQLLSA

SEQ ID NO: 18988 - protein, 9 aa, Artificial
  helical interface sequence
GIFAQALST

SEQ ID NO: 18989 - protein, 7 aa, Artificial
  helical interface sequence
GIFAQAL

SEQ ID NO: 18990 - protein, 11 aa, Artificial
  helical interface sequence
RPDAEYYNKQY

SEQ ID NO: 18991 - protein, 14 aa, Artificial
  helical interface sequence
EVALQEYRTVARSL

SEQ ID NO: 18992 - protein, 13 aa, Artificial
  helical interface sequence
VALQEYRTVARSL

SEQ ID NO: 18993 - protein, 13 aa, Artificial
  helical interface sequence
EREIVRDIKEKLC

SEQ ID NO: 18994 - protein, 8 aa, Artificial
  helical interface sequence
LWLAKGLF

SEQ ID NO: 18995 - protein, 22 aa, Artificial
  helical interface sequence
LMEINTSGTFLTQALNHMYKLR

SEQ ID NO: 18996 - protein, 12 aa, Artificial
  helical interface sequence
YMELTKLLLNHA

SEQ ID NO: 18997 - protein, 11 aa, Artificial
  helical interface sequence
VEELIKMFAHF

SEQ ID NO: 18998 - protein, 10 aa, Artificial
  helical interface sequence
YKLFCEDILQ

SEQ ID NO: 18999 - protein, 8 aa, Artificial
  helical interface sequence
KEDFRYRS

SEQ ID NO: 19000 - protein, 11 aa, Artificial
  helical interface sequence
EQFNLRMQAAS

SEQ ID NO: 19001 - protein, 15 aa, Artificial
  helical interface sequence
IFRFTQAGSEVSALL

SEQ ID NO: 19002 - protein, 29 aa, Artificial
  helical interface sequence
RRDFLYYATAGAGAVATGAAVWPLINQMN

SEQ ID NO: 19003 - protein, 32 aa, Artificial; identical to SEQ ID NO: 462
  helical interface sequence

SEQ ID NO: 19004 - protein, 17 aa, Artificial
  helical interface sequence
QMSFWGATVITGLFGAI

SEQ ID NO: 19005 - protein, 17 aa, Artificial
  helical interface sequence
QMSFWGATVITGLFGAI

SEQ ID NO: 19006 - protein, 9 aa, Artificial
  helical interface sequence
HSIQTWLLG

SEQ ID NO: 19007 - protein, 9 aa, Artificial
  helical interface sequence
HSIQTWLLG

SEQ ID NO: 19008 - protein, 28 aa, Artificial
  helical interface sequence
RRDFLYYATAGAGAVATGAAVWPLINQM

SEQ ID NO: 19009 - protein, 32 aa, Artificial; identical to SEQ ID NO: 462
  helical interface sequence

SEQ ID NO: 19010 - protein, 32 aa, Artificial; identical to SEQ ID NO: 462
  helical interface sequence

SEQ ID NO: 19011 - protein, 18 aa, Artificial
  helical interface sequence
AKFFGVLAMFGAILVMAL

SEQ ID NO: 19012 - protein, 17 aa, Artificial
  helical interface sequence
QMSFWGATVITGLFGAI

SEQ ID NO: 19013 - protein, 23 aa, Artificial
  helical interface sequence
IWGVVLAFCLVLQIVTGIVLAMH

SEQ ID NO: 19014 - protein, 32 aa, Artificial; identical to SEQ ID NO: 462
  helical interface sequence

SEQ ID NO: 19015 - protein, 32 aa, Artificial; identical to SEQ ID NO: 462
  helical interface sequence

SEQ ID NO: 19016 - protein, 12 aa, Artificial
  helical interface sequence
PSVMERYYYTLD

SEQ ID NO: 19017 - protein, 14 aa, Artificial
  helical interface sequence
LDVMGEIYIALKNL

SEQ ID NO: 19018 - protein, 16 aa, Artificial
  helical interface sequence
AIDAAVAIGFALAVVH

SEQ ID NO: 19019 - protein, 7 aa, Artificial
  helical interface sequence
VLAEVRR

SEQ ID NO: 19020 - protein, 14 aa, Artificial
  helical interface sequence
PFAAQVAAERCADA

SEQ ID NO: 19021 - protein, 20 aa, Artificial
  helical interface sequence
KKEAEKTVREMAKIGFEMRG

SEQ ID NO: 19022 - protein, 6 aa, Artificial
  helical interface sequence
DEQLKS

SEQ ID NO: 19023 - protein, 8 aa, Artificial
  helical interface sequence
DEVVQLAN

SEQ ID NO: 19024 - protein, 7 aa, Artificial
  helical interface sequence
DEQLKSG

SEQ ID NO: 19025 - protein, 7 aa, Artificial
  helical interface sequence
DEQLKSG

SEQ ID NO: 19026 - protein, 7 aa, Artificial
  helical interface sequence
DEQLKSG

SEQ ID NO: 19027 - protein, 8 aa, Artificial
  helical interface sequence
AIAEIDKF

SEQ ID NO: 19028 - protein, 10 aa, Artificial
  helical interface sequence
FLTAARIAKE

SEQ ID NO: 19029 - protein, 7 aa, Artificial
  helical interface sequence
PKKRMRY

SEQ ID NO: 19030 - protein, 19 aa, Artificial
  helical interface sequence
PQVQAAYQKVVAGVANALA

SEQ ID NO: 19031 - protein, 20 aa, Artificial
  helical interface sequence
PENFRLLGNVLVIVLSHHFG

SEQ ID NO: 19032 - protein, 22 aa, Artificial
  helical interface sequence
LGEFLKLDRERAKNKIAKETNN

SEQ ID NO: 19033 - protein, 12 aa, Artificial
  helical interface sequence
LKKWRTEILDYC

SEQ ID NO: 19034 - protein, 12 aa, Artificial
  helical interface sequence
LKKWRTEILDYC

SEQ ID NO: 19035 - protein, 9 aa, Artificial
  helical interface sequence
SEISSILEK

SEQ ID NO: 19036 - protein, 8 aa, Artificial
  helical interface sequence
IKPVQRIM

SEQ ID NO: 19037 - protein, 16 aa, Artificial
  helical interface sequence
YQLLLKDFLKYYNRAG

SEQ ID NO: 19038 - protein, 5 aa, Artificial
  helical interface sequence
KHWLR

SEQ ID NO: 19039 - protein, 18 aa, Artificial
  helical interface sequence
VNFKLLSHSLLVTLACHL

SEQ ID NO: 19040 - protein, 16 aa, Artificial
  helical interface sequence
MVEIQHGFQHLICSLN

SEQ ID NO: 19041 - protein, 6 aa, Artificial
  helical interface sequence
LSYPQT

SEQ ID NO: 19042 - protein, 16 aa, Artificial
  helical interface sequence
PEEKEAYIAMGQRMFE

SEQ ID NO: 19043 - protein, 15 aa, Artificial
  helical interface sequence
EGDVKSFSRVMVHVF

SEQ ID NO: 19044 - protein, 14 aa, Artificial
  helical interface sequence
YSWIINGIEWAIAN

SEQ ID NO: 19045 - protein, 8 aa, Artificial
  helical interface sequence
IDEVNRTF

SEQ ID NO: 19046 - protein, 8 aa, Artificial
  helical interface sequence
IDEVNRTF

SEQ ID NO: 19047 - protein, 25 aa, Artificial
  helical interface sequence
SDRMAACLRDMEIILRYVTYAVFAG

SEQ ID NO: 19048 - protein, 10 aa, Artificial
  helical interface sequence
VTPIANAWLD

SEQ ID NO: 19049 - protein, 36 aa, Artificial
  helical interface sequence
NYDKLKSRISEIIDSRRRLEEDLKKQAAEYREIDKR

SEQ ID NO: 19050 - protein, 16 aa, Artificial
  helical interface sequence
VMPLMACARALAQTLA

SEQ ID NO: 19051 - protein, 10 aa, Artificial
  helical interface sequence
PGKGACKMAG

SEQ ID NO: 19052 - protein, 10 aa, Artificial
  helical interface sequence
PGKGACKMAG

SEQ ID NO: 19053 - protein, 10 aa, Artificial
  helical interface sequence
IPQSRELIAQ

SEQ ID NO: 19054 - protein, 13 aa, Artificial
  helical interface sequence
SETFTETWNRFIT

SEQ ID NO: 19055 - protein, 6 aa, Artificial
  helical interface sequence
DEQLKS

SEQ ID NO: 19056 - protein, 28 aa, Artificial
  helical interface sequence
SEHYDVARGVQKILQDYKSLQDIIAILG

SEQ ID NO: 19057 - protein, 10 aa, Artificial
  helical interface sequence
TKELGTVMRS

SEQ ID NO: 19058 - protein, 6 aa, Artificial
  helical interface sequence
SEQLTS

SEQ ID NO: 19059 - protein, 15 aa, Artificial
  helical interface sequence
PSTRNFFELNRGAIK

SEQ ID NO: 19060 - protein, 16 aa, Artificial
  helical interface sequence
PSTRNFFELNRGAIKC

SEQ ID NO: 19061 - protein, 6 aa, Artificial
  helical interface sequence
TADILC

SEQ ID NO: 19062 - protein, 17 aa, Artificial
  helical interface sequence
KAFIQQCIRQLCEFLTE

SEQ ID NO: 19063 - protein, 7 aa, Artificial
  helical interface sequence
EENIKNN

SEQ ID NO: 19064 - protein, 8 aa, Artificial
  helical interface sequence
FQALCVLD

SEQ ID NO: 19065 - protein, 15 aa, Artificial
  helical interface sequence
KVAFTALVEKAKAAL

SEQ ID NO: 19066 - protein, 14 aa, Artificial
  helical interface sequence
GAVRVRAAAVISSN

SEQ ID NO: 19067 - protein, 16 aa, Artificial
  helical interface sequence
DEMFSSAKELVVVYEG

SEQ ID NO: 19068 - protein, 11 aa, Artificial
  helical interface sequence
VAEQLRAYLEG

SEQ ID NO: 19069 - protein, 8 aa, Artificial
  helical interface sequence
LREVNRTF

SEQ ID NO: 19070 - protein, 25 aa, Artificial
  helical interface sequence
NRRMAACLRDMEIILRYVSYALLAG

SEQ ID NO: 19071 - protein, 22 aa, Artificial
  helical interface sequence
LFFRYMAIGGYVGAATVGAAAW

SEQ ID NO: 19072 - protein, 17 aa, Artificial
  helical interface sequence
AVITTCLALGTRRMAKK

SEQ ID NO: 19073 - protein, 6 aa, Artificial
  helical interface sequence
DTCMAD

SEQ ID NO: 19074 - protein, 6 aa, Artificial
  helical interface sequence
DTCMAD

SEQ ID NO: 19075 - protein, 14 aa, Artificial
  helical interface sequence
RQAASLIRVAAAVG

SEQ ID NO: 19076 - protein, 9 aa, Artificial
  helical interface sequence
YQGCMDCLM

SEQ ID NO: 19077 - protein, 9 aa, Artificial
  helical interface sequence
WIDVYTRAT

SEQ ID NO: 19078 - protein, 9 aa, Artificial
  helical interface sequence
AFDTLFDHA

SEQ ID NO: 19079 - protein, 13 aa, Artificial
  helical interface sequence
AANLLQDMGQRLN

SEQ ID NO: 19080 - protein, 18 aa, Artificial
  helical interface sequence
PVNFKLLSHCLLVTLAAH

SEQ ID NO: 19081 - protein, 64 aa, Artificial; identical to SEQ ID NO: 9506
  helical interface sequence

SEQ ID NO: 19082 - protein, 8 aa, Artificial
  helical interface sequence
YHVATYFD

SEQ ID NO: 19083 - protein, 8 aa, Artificial
  helical interface sequence
VVENIIIG

SEQ ID NO: 19084 - protein, 12 aa, Artificial
  helical interface sequence
LQRTYDYLNSVE

SEQ ID NO: 19085 - protein, 8 aa, Artificial
  helical interface sequence
LNEIALNE

SEQ ID NO: 19086 - protein, 16 aa, Artificial
  helical interface sequence
QSLLTLGRVITALVDR

SEQ ID NO: 19087 - protein, 8 aa, Artificial
  helical interface sequence
EAEISHTQ

SEQ ID NO: 19088 - protein, 5 aa, Artificial
  helical interface sequence
DLAVR

SEQ ID NO: 19089 - protein, 10 aa, Artificial
  helical interface sequence
IARIMAFLMG

SEQ ID NO: 19090 - protein, 12 aa, Artificial
  helical interface sequence
EAFSLVVATHLS

SEQ ID NO: 19091 - protein, 18 aa, Artificial
  helical interface sequence
LGTIKSRIRLALDRLRQH

SEQ ID NO: 19092 - protein, 10 aa, Artificial
  helical interface sequence
DALLTAYAAG

SEQ ID NO: 19093 - protein, 20 aa, Artificial
  helical interface sequence
KVTAMKCFLLELQVISLESG

SEQ ID NO: 19094 - protein, 6 aa, Artificial
  helical interface sequence
PEMRLK

SEQ ID NO: 19095 - protein, 15 aa, Artificial
  helical interface sequence
TKLLVSEVAKIMQEA

SEQ ID NO: 19096 - protein, 22 aa, Artificial
  helical interface sequence
TADAEILINTARIHAQNYLKTY

SEQ ID NO: 19097 - protein, 18 aa, Artificial
  helical interface sequence
PSYIFEYLATVMYQRRSK

SEQ ID NO: 19098 - protein, 15 aa, Artificial
  helical interface sequence
TKLLVSEVAKIMQEA

SEQ ID NO: 19099 - protein, 18 aa, Artificial
  helical interface sequence
GPDYRVLVDKSRKVAHTS

SEQ ID NO: 19100 - protein, 22 aa, Artificial
  helical interface sequence
AADTQAIADIVQYHLELYTSQY

SEQ ID NO: 19101 - protein, 22 aa, Artificial
  helical interface sequence
AADTQAIADIVQYHLELYTSQY

SEQ ID NO: 19102 - protein, 18 aa, Artificial
  helical interface sequence
PEDLFETISQALLNAADR

SEQ ID NO: 19103 - protein, 17 aa, Artificial
  helical interface sequence
PQAVSSFVRQELAKSIR

SEQ ID NO: 19104 - protein, 13 aa, Artificial
  helical interface sequence
YSGFYTFSLLDHH

SEQ ID NO: 19105 - protein, 10 aa, Artificial
  helical interface sequence
ERFRSLTTAF

SEQ ID NO: 19106 - protein, 9 aa, Artificial
  helical interface sequence
EWYYQHVRA

SEQ ID NO: 19107 - protein, 19 aa, Artificial
  helical interface sequence
AKESAAYLTIMTRYLQKLY

SEQ ID NO: 19108 - protein, 17 aa, Artificial
  helical interface sequence
WKELADFTCAFTKAVAE

SEQ ID NO: 19109 - protein, 11 aa, Artificial
  helical interface sequence
KELMELRFQAA

SEQ ID NO: 19110 - protein, 26 aa, Artificial
  helical interface sequence
PNDLLYVFPIVIMGSFACIVALAVLD

SEQ ID NO: 19111 - protein, 14 aa, Artificial
  helical interface sequence
RELAQQIQKVVMAL

SEQ ID NO: 19112 - protein, 16 aa, Artificial
  helical interface sequence
FEKTLTPIIQEYFEHG

SEQ ID NO: 19113 - protein, 31 aa, Artificial
  helical interface sequence
QLQQAEEALVAKQELIDKLKEEAEQHKIVME

SEQ ID NO: 19114 - protein, 30 aa, Artificial
  helical interface sequence
YEQRKIVEFTCHTSFFISIVVVQWADLIIC

SEQ ID NO: 19115 - protein, 5 aa, Artificial
  helical interface sequence
ICVAY

SEQ ID NO: 19116 - protein, 10 aa, Artificial
  helical interface sequence
PPTVKSYARK

SEQ ID NO: 19117 - protein, 7 aa, Artificial
  helical interface sequence
FVFGFLS

SEQ ID NO: 19118 - protein, 9 aa, Artificial
  helical interface sequence
FPFFVVGVV

SEQ ID NO: 19119 - protein, 20 aa, Artificial
  helical interface sequence
FPFFVVGVVHLISSAVLGFG

SEQ ID NO: 19120 - protein, 19 aa, Artificial
  helical interface sequence
GPEASQAQAMTFLIRDQKL

SEQ ID NO: 19121 - protein, 19 aa, Artificial
  helical interface sequence
GPEASQAQAMTFLIRDQKL

SEQ ID NO: 19122 - protein, 19 aa, Artificial
  helical interface sequence
GPEASQAQAMTFLIRDQKL

SEQ ID NO: 19123 - protein, 7 aa, Artificial
  helical interface sequence
FTRWCQL

SEQ ID NO: 19124 - protein, 29 aa, Artificial
  helical interface sequence
PSLKGFFIGLLSGAVVLGLTFAVLIAISQ

SEQ ID NO: 19125 - protein, 9 aa, Artificial
  helical interface sequence
IIFLLAVRR

SEQ ID NO: 19126 - protein, 11 aa, Artificial
  helical interface sequence
VILSFVMVIGV

SEQ ID NO: 19127 - protein, 38 aa, Artificial; identical to SEQ ID NO: 12753
  helical interface sequence

SEQ ID NO: 19128 - protein, 7 aa, Artificial
  helical interface sequence
DEQLKSG

SEQ ID NO: 19129 - protein, 61 aa, Artificial; identical to SEQ ID NO: 337
  helical interface sequence

SEQ ID NO: 19130 - protein, 12 aa, Artificial
  helical interface sequence
TAEREIVRDIKE

SEQ ID NO: 19131 - protein, 9 aa, Artificial
  helical interface sequence
VDVRKELYG

SEQ ID NO: 19132 - protein, 16 aa, Artificial
  helical interface sequence
KSNREKMTQIMFETFN

SEQ ID NO: 19133 - protein, 28 aa, Artificial
  helical interface sequence
HREIEMAQKLLNSDLGELINKMKLAQQY

SEQ ID NO: 19134 - protein, 10 aa, Artificial
  helical interface sequence
TEIGIEMKFK

SEQ ID NO: 19135 - protein, 17 aa, Artificial
  helical interface sequence
QYRIRLEEKQKLRFHYG

SEQ ID NO: 19136 - protein, 9 aa, Artificial
  helical interface sequence
KTTLLKQLA

SEQ ID NO: 19137 - protein, 7 aa, Artificial
  helical interface sequence
DEQLKSG

SEQ ID NO: 19138 - protein, 14 aa, Artificial
  helical interface sequence
KLGDGLFRNIITEI

SEQ ID NO: 19139 - protein, 16 aa, Artificial
  helical interface sequence
NLYGDILSDLNSGLSA

SEQ ID NO: 19140 - protein, 11 aa, Artificial
  helical interface sequence
VDNASMQAVAK

SEQ ID NO: 19141 - protein, 16 aa, Artificial
  helical interface sequence
NLYGDILSDLNSGLSA

SEQ ID NO: 19142 - protein, 16 aa, Artificial
  helical interface sequence
NLYGDILSDLNSGLSA

SEQ ID NO: 19143 - protein, 18 aa, Artificial
  helical interface sequence
HTVSRLLRVMQCLSRIEE

SEQ ID NO: 19144 - protein, 10 aa, Artificial
  helical interface sequence
PTLAKLIVKN

SEQ ID NO: 19145 - protein, 19 aa, Artificial
  helical interface sequence
GPEASQAQAMTFLIRDQKL

SEQ ID NO: 19146 - protein, 19 aa, Artificial
  helical interface sequence
FYTKNLLLNEGIRAWMAPQ

SEQ ID NO: 19147 - protein, 13 aa, Artificial
  helical interface sequence
AKALQIIKLAELY

SEQ ID NO: 19148 - protein, 5 aa, Artificial
  helical interface sequence
DAILD

SEQ ID NO: 19149 - protein, 10 aa, Artificial
  helical interface sequence
NKDYAQWILK

SEQ ID NO: 19150 - protein, 13 aa, Artificial
  helical interface sequence
TVALREIRRYQKS

SEQ ID NO: 19151 - protein, 8 aa, Artificial
  helical interface sequence
EEDDDMKE

SEQ ID NO: 19152 - protein, 22 aa, Artificial
  helical interface sequence
AQGALANIAVDKANLEIMTKRS

SEQ ID NO: 19153 - protein, 12 aa, Artificial
  helical interface sequence
FHDLMELFRIGG

SEQ ID NO: 19154 - protein, 6 aa, Artificial
  helical interface sequence
WDGWFR

SEQ ID NO: 19155 - protein, 21 aa, Artificial
  helical interface sequence
PEILERTRAELDTVCRHNYEG

SEQ ID NO: 19156 - protein, 25 aa, Artificial
  helical interface sequence
QYKPVVYSNTIQSLAAIVRAMDTLG

SEQ ID NO: 19157 - protein, 13 aa, Artificial
  helical interface sequence
HETRELTKTNLQA

SEQ ID NO: 19158 - protein, 9 aa, Artificial
  helical interface sequence
LDMKIKKMN

SEQ ID NO: 19159 - protein, 24 aa, Artificial
  helical interface sequence
EAEHQRAYLEDTCVEWLHKYLEKG

SEQ ID NO: 19160 - protein, 10 aa, Artificial
  helical interface sequence
EEMKFLSIIS

SEQ ID NO: 19161 - protein, 14 aa, Artificial
  helical interface sequence
KADHYAALDELINA

SEQ ID NO: 19162 - protein, 5 aa, Artificial
  helical interface sequence
ENIYN

SEQ ID NO: 19163 - protein, 15 aa, Artificial
  helical interface sequence
DRRVGAIVLAVTILA

SEQ ID NO: 19164 - protein, 15 aa, Artificial
  helical interface sequence
DRRVGAIVLAVTILA

SEQ ID NO: 19165 - protein, 15 aa, Artificial
  helical interface sequence
DRRVGAIVLAVTILA

SEQ ID NO: 19166 - protein, 9 aa, Artificial
  helical interface sequence
QAVLSLYAS

SEQ ID NO: 19167 - protein, 9 aa, Artificial
  helical interface sequence
QAVLSLYAS

SEQ ID NO: 19168 - protein, 7 aa, Artificial
  helical interface sequence
LLQLARI

SEQ ID NO: 19169 - protein, 6 aa, Artificial
  helical interface sequence
AWRRDL

SEQ ID NO: 19170 - protein, 12 aa, Artificial
  helical interface sequence
IMEFVKAFNAAT

SEQ ID NO: 19171 - protein, 12 aa, Artificial
  helical interface sequence
IMEFVKAFNAAT

SEQ ID NO: 19172 - protein, 7 aa, Artificial
  helical interface sequence
LDKARSQ

SEQ ID NO: 19173 - protein, 15 aa, Artificial
  helical interface sequence
LGELPQGFARLSAIY

SEQ ID NO: 19174 - protein, 6 aa, Artificial
  helical interface sequence
DAAKNQ

SEQ ID NO: 19175 - protein, 23 aa, Artificial
  helical interface sequence
LICGLRQLANETTQALQLFLRAT

SEQ ID NO: 19176 - protein, 24 aa, Artificial
  helical interface sequence
NLAIQIADNFLRKVYCLYSDYVMK

SEQ ID NO: 19177 - protein, 23 aa, Artificial
  helical interface sequence
QNEEDAKLLYGMIFSLRSITQKL

SEQ ID NO: 19178 - protein, 21 aa, Artificial
  helical interface sequence
SNEYLILASTLHGVFAIASQL

SEQ ID NO: 19179 - protein, 11 aa, Artificial
  helical interface sequence
SLKAMGEEIWK

SEQ ID NO: 19180 - protein, 21 aa, Artificial
  helical interface sequence
SNEYLILASTLHGVFAIASQL

SEQ ID NO: 19181 - protein, 11 aa, Artificial
  helical interface sequence
SLKAMGEEIWK

SEQ ID NO: 19182 - protein, 17 aa, Artificial
  helical interface sequence
TQVLQYIYSHIYVKYVS

SEQ ID NO: 19183 - protein, 11 aa, Artificial
  helical interface sequence
SLKAMGEEIWK

SEQ ID NO: 19184 - protein, 17 aa, Artificial
  helical interface sequence
TQVLQYIYSHIYVKYVS

SEQ ID NO: 19185 - protein, 23 aa, Artificial
  helical interface sequence
VGDFYYELGVQIIEVCLALKHRN

SEQ ID NO: 19186 - protein, 6 aa, Artificial
  helical interface sequence
LKEMDN

SEQ ID NO: 19187 - protein, 14 aa, Artificial
  helical interface sequence
MTNVTFDYLHATAF

SEQ ID NO: 19188 - protein, 23 aa, Artificial
  helical interface sequence
PLSQTLFWLLVANLLILTWIGSQ

SEQ ID NO: 19189 - protein, 20 aa, Artificial
  helical interface sequence
DLYNERMFRIKRALDLSLKH

SEQ ID NO: 19190 - protein, 29 aa, Artificial
  helical interface sequence
IIIGQMASLSYFTILLILFPTIGTLENKM

SEQ ID NO: 19191 - protein, 35 aa, Artificial; identical to SEQ ID NO: 651
  helical interface sequence

SEQ ID NO: 19192 - protein, 19 aa, Artificial
  helical interface sequence
HASIRRGYQVYREVCAACH

SEQ ID NO: 19193 - protein, 7 aa, Artificial
  helical interface sequence
YMRIRSD

SEQ ID NO: 19194 - protein, 8 aa, Artificial
  helical interface sequence
PHEIQEAN

SEQ ID NO: 19195 - protein, 8 aa, Artificial
  helical interface sequence
RARFEELC

SEQ ID NO: 19196 - protein, 19 aa, Artificial
  helical interface sequence
PQVQAAFQKVVAGVANALA

SEQ ID NO: 19197 - protein, 15 aa, Artificial
  helical interface sequence
PRGETIERVLREEKG

SEQ ID NO: 19198 - protein, 8 aa, Artificial
  helical interface sequence
KPEAERIK

SEQ ID NO: 19199 - protein, 16 aa, Artificial
  helical interface sequence
ARILEKAAQELALITG

SEQ ID NO: 19200 - protein, 32 aa, Artificial; identical to SEQ ID NO: 4981
  helical interface sequence

SEQ ID NO: 19201 - protein, 15 aa, Artificial
  helical interface sequence
VKEVMHYLGQYIMVK

SEQ ID NO: 19202 - protein, 34 aa, Artificial; identical to SEQ ID NO: 18670
  helical interface sequence

SEQ ID NO: 19203 - protein, 5 aa, Artificial
  helical interface sequence
GEDAG

SEQ ID NO: 19204 - protein, 15 aa, Artificial
  helical interface sequence
PEHCIEYVRMLQWPK

SEQ ID NO: 19205 - protein, 13 aa, Artificial
  helical interface sequence
VERIKERVEEKEG

SEQ ID NO: 19206 - protein, 14 aa, Artificial
  helical interface sequence
ATGTEILKNLVLPG

SEQ ID NO: 19207 - protein, 32 aa, Artificial; identical to SEQ ID NO: 7030
  helical interface sequence

SEQ ID NO: 19208 - protein, 15 aa, Artificial
  helical interface sequence
PSIKALILQIDAKMS

SEQ ID NO: 19209 - protein, 19 aa, Artificial
  helical interface sequence
YTFANLISSIQTDESRHAQ

SEQ ID NO: 19210 - protein, 8 aa, Artificial
  helical interface sequence
TLADQALH

SEQ ID NO: 19211 - protein, 19 aa, Artificial
  helical interface sequence
PVNFKLLGHCFLVVVAVHF

SEQ ID NO: 19212 - protein, 19 aa, Artificial
  helical interface sequence
PVNFKLLGHCFLVVVAVHF

SEQ ID NO: 19213 - protein, 9 aa, Artificial
  helical interface sequence
LIEASRAMG

SEQ ID NO: 19214 - protein, 6 aa, Artificial
  helical interface sequence
SEQLTS

SEQ ID NO: 19215 - protein, 22 aa, Artificial
  helical interface sequence
GTSALIAVGVALDIIQQMETHM

SEQ ID NO: 19216 - protein, 33 aa, Artificial
  helical interface sequence
RSTEQYLHRVLNRVTFIGAVFLVVIALLPYLVQ

SEQ ID NO: 19217 - protein, 12 aa, Artificial
  helical interface sequence
NSAWSHRFFLLF

SEQ ID NO: 19218 - protein, 12 aa, Artificial
  helical interface sequence
YSQCGDVMRALG

SEQ ID NO: 19219 - protein, 5 aa, Artificial
  helical interface sequence
DVIIA

SEQ ID NO: 19220 - protein, 14 aa, Artificial
  helical interface sequence
EEQTAEFKEAFQLF

SEQ ID NO: 19221 - protein, 16 aa, Artificial
  helical interface sequence
AAFNAALTVAMREATG

SEQ ID NO: 19222 - protein, 6 aa, Artificial
  helical interface sequence
DEQLKS

SEQ ID NO: 19223 - protein, 13 aa, Artificial
  helical interface sequence
DEVLLALAEQLGT

SEQ ID NO: 19224 - protein, 28 aa, Artificial
  helical interface sequence
QKVVEQKQMKDFMRLYSNLVERCFTDCV

SEQ ID NO: 19225 - protein, 16 aa, Artificial
  helical interface sequence
VKYVQEKKLIQRFFDE

SEQ ID NO: 19226 - protein, 16 aa, Artificial
  helical interface sequence
VKYVQEKKLIQRFFDE

SEQ ID NO: 19227 - protein, 27 aa, Artificial
  helical interface sequence
LTKKTQAASVEAVKMLDEILLQLSASV

SEQ ID NO: 19228 - protein, 8 aa, Artificial
  helical interface sequence
MDDVYNYI

SEQ ID NO: 19229 - protein, 15 aa, Artificial
  helical interface sequence
SVKTQQFAQRWITQV

SEQ ID NO: 19230 - protein, 14 aa, Artificial
  helical interface sequence
KAVRLAALNALADS

SEQ ID NO: 19231 - protein, 16 aa, Artificial
  helical interface sequence
VSMSAGACLQLFAQNC

SEQ ID NO: 19232 - protein, 13 aa, Artificial
  helical interface sequence
PPDVHVLKLIDEQ

SEQ ID NO: 19233 - protein, 15 aa, Artificial
  helical interface sequence
IVIKREMVSQYLHTS

SEQ ID NO: 19234 - protein, 15 aa, Artificial
  helical interface sequence
IVIKREMVSQYLHTS

SEQ ID NO: 19235 - protein, 7 aa, Artificial
  helical interface sequence
DEEAEKI

SEQ ID NO: 19236 - protein, 19 aa, Artificial
  helical interface sequence
APSLRVTATAARTISVLTG

SEQ ID NO: 19237 - protein, 18 aa, Artificial
  helical interface sequence
PDEFQKILDFMKDVMKKL

SEQ ID NO: 19238 - protein, 15 aa, Artificial
  helical interface sequence
LLDELYQRFDAAIEE

SEQ ID NO: 19239 - protein, 8 aa, Artificial
  helical interface sequence
PEKIRNAC

SEQ ID NO: 19240 - protein, 16 aa, Artificial
  helical interface sequence
ELDMMVGKILCYLYLS

SEQ ID NO: 19241 - protein, 11 aa, Artificial
  helical interface sequence
VGEDIRKLDYG

SEQ ID NO: 19242 - protein, 13 aa, Artificial
  helical interface sequence
GQIFEAYNMAALW

SEQ ID NO: 19243 - protein, 14 aa, Artificial
  helical interface sequence
EMGFAGIAVGAAMA

SEQ ID NO: 19244 - protein, 6 aa, Artificial
  helical interface sequence
KILEDN

SEQ ID NO: 19245 - protein, 27 aa, Artificial
  helical interface sequence
REDGLKYYRMMQTVRRMELKADQLYKQ

SEQ ID NO: 19246 - protein, 5 aa, Artificial
  helical interface sequence
VAQYD

SEQ ID NO: 19247 - protein, 19 aa, Artificial
  helical interface sequence
LKSTQAAIDQINGKLNRVI

SEQ ID NO: 19248 - protein, 16 aa, Artificial
  helical interface sequence
LTERVRESLRIWKNTE

SEQ ID NO: 19249 - protein, 15 aa, Artificial
  helical interface sequence
SDVDLSKYITTIAGV

SEQ ID NO: 19250 - protein, 7 aa, Artificial
  helical interface sequence
RELREKG

SEQ ID NO: 19251 - protein, 5 aa, Artificial
  helical interface sequence
YFIRN

SEQ ID NO: 19252 - protein, 9 aa, Artificial
  helical interface sequence
NSFAFELCS

SEQ ID NO: 19253 - protein, 6 aa, Artificial
  helical interface sequence
SAEYLQ

SEQ ID NO: 19254 - protein, 23 aa, Artificial
  helical interface sequence
VKYIEGLQWRTQQILTEHIRMMQ

SEQ ID NO: 19255 - protein, 13 aa, Artificial
  helical interface sequence
LGNWVCAAKFESN

SEQ ID NO: 19256 - protein, 13 aa, Artificial
  helical interface sequence
GRQTALFLLKLAS

SEQ ID NO: 19257 - protein, 10 aa, Artificial
  helical interface sequence
TEMITTLKKI

SEQ ID NO: 19258 - protein, 13 aa, Artificial
  helical interface sequence
GRQTALFLLKLAS

SEQ ID NO: 19259 - protein, 10 aa, Artificial
  helical interface sequence
NLVARQIVNS

SEQ ID NO: 19260 - protein, 13 aa, Artificial
  helical interface sequence
GRQTALFLLKLAS

SEQ ID NO: 19261 - protein, 21 aa, Artificial
  helical interface sequence
QVIMEKSTMLYNKFKNMFLVG

SEQ ID NO: 19262 - protein, 12 aa, Artificial
  helical interface sequence
IEPAQEEHEKYH

SEQ ID NO: 19263 - protein, 13 aa, Artificial
  helical interface sequence
GRQTALFLLKLAS

SEQ ID NO: 19264 - protein, 11 aa, Artificial
  helical interface sequence
VNLYQNYSELI

SEQ ID NO: 19265 - protein, 29 aa, Artificial
  helical interface sequence
PEYWDRNTQIFKTNTQTDRESLRNLRGYY

SEQ ID NO: 19266 - protein, 9 aa, Artificial
  helical interface sequence
MFPLLMVVA

SEQ ID NO: 19267 - protein, 9 aa, Artificial
  helical interface sequence
MFPLLMVVA

SEQ ID NO: 19268 - protein, 14 aa, Artificial
  helical interface sequence
RDSYRRILMGSTLR

SEQ ID NO: 19269 - protein, 6 aa, Artificial
  helical interface sequence
QYAYRD

SEQ ID NO: 19270 - protein, 15 aa, Artificial
  helical interface sequence
LSKQAVAYRQLSLLL

SEQ ID NO: 19271 - protein, 28 aa, Artificial
  helical interface sequence
QEHYDVASKVQETLQTYKSLQDIIAILG

SEQ ID NO: 19272 - protein, 10 aa, Artificial
  helical interface sequence
LKEVEMRLKS

SEQ ID NO: 19273 - protein, 15 aa, Artificial
  helical interface sequence
LSKQAVAYRQLSLLL

SEQ ID NO: 19274 - protein, 7 aa, Artificial
  helical interface sequence
AELFYKG

SEQ ID NO: 19275 - protein, 23 aa, Artificial
  helical interface sequence
PGARARVALTGLTIAEYFRDEEG

SEQ ID NO: 19276 - protein, 16 aa, Artificial
  helical interface sequence
IFRFTQAGSEVSALLG

SEQ ID NO: 19277 - protein, 5 aa, Artificial
  helical interface sequence
EVFTG

SEQ ID NO: 19278 - protein, 7 aa, Artificial
  helical interface sequence
RGISELG

SEQ ID NO: 19279 - protein, 10 aa, Artificial
  helical interface sequence
YEELKHLLSR

SEQ ID NO: 19280 - protein, 19 aa, Artificial
  helical interface sequence
PVNFKLLGQCFLVVVAIHH

SEQ ID NO: 19281 - protein, 10 aa, Artificial
  helical interface sequence
YQEQLKLINH

SEQ ID NO: 19282 - protein, 11 aa, Artificial
  helical interface sequence
NCLDAAKACNL

SEQ ID NO: 19283 - protein, 11 aa, Artificial
  helical interface sequence
YHELKVAMKAL

SEQ ID NO: 19284 - protein, 8 aa, Artificial
  helical interface sequence
NYELISNE

SEQ ID NO: 19285 - protein, 15 aa, Artificial
  helical interface sequence
EEQIAEFKEAFSLFD

SEQ ID NO: 19286 - protein, 14 aa, Artificial
  helical interface sequence
KATKKRLAKLDNQN

SEQ ID NO: 19287 - protein, 6 aa, Artificial
  helical interface sequence
DEQLKS

SEQ ID NO: 19288 - protein, 9 aa, Artificial
  helical interface sequence
YEELKHLLS

SEQ ID NO: 19289 - protein, 7 aa, Artificial
  helical interface sequence
LFFPHEY

SEQ ID NO: 19290 - protein, 7 aa, Artificial
  helical interface sequence
IVDRFLA

SEQ ID NO: 19291 - protein, 5 aa, Artificial
  helical interface sequence
MQELE

SEQ ID NO: 19292 - protein, 8 aa, Artificial
  helical interface sequence
ERELWEKE

SEQ ID NO: 19293 - protein, 29 aa, Artificial
  helical interface sequence
GCRMKGLIDEVNQDFTNRINKLKNSLFEY

SEQ ID NO: 19294 - protein, 10 aa, Artificial
  helical interface sequence
YMYLLKDLWQ

SEQ ID NO: 19295 - protein, 17 aa, Artificial
  helical interface sequence
GCRMKGLIDEVNQDFTN

SEQ ID NO: 19296 - protein, 8 aa, Artificial
  helical interface sequence
LYIDETVN

SEQ ID NO: 19297 - protein, 7 aa, Artificial
  helical interface sequence
TCGIADF

SEQ ID NO: 19298 - protein, 21 aa, Artificial
  helical interface sequence
PTDIQLYYQTLLIGRKELPYA

SEQ ID NO: 19299 - protein, 12 aa, Artificial
  helical interface sequence
VDAVREVTEKLN

SEQ ID NO: 19300 - protein, 17 aa, Artificial
  helical interface sequence
PTDIQLYYQTLLIGRKE

SEQ ID NO: 19301 - protein, 15 aa, Artificial
  helical interface sequence
RRMGVEMTLLRALAF

SEQ ID NO: 19302 - protein, 12 aa, Artificial
  helical interface sequence
ALNCGIMLRECI

SEQ ID NO: 19303 - protein, 5 aa, Artificial
  helical interface sequence
HMENL

SEQ ID NO: 19304 - protein, 6 aa, Artificial
  helical interface sequence
LIEKFL

SEQ ID NO: 19305 - protein, 27 aa, Artificial
  helical interface sequence
EKEQIREDILENQFMDSRMQLAKLCYD

SEQ ID NO: 19306 - protein, 15 aa, Artificial
  helical interface sequence
TKIGKEVIKEMVETG

SEQ ID NO: 19307 - protein, 11 aa, Artificial
  helical interface sequence
IIAPSEASSNL

SEQ ID NO: 19308 - protein, 19 aa, Artificial
  helical interface sequence
YLKAQKVRRLITNDFLKAF

SEQ ID NO: 19309 - protein, 19 aa, Artificial
  helical interface sequence
YLKAQKVRRLITNDFLKAF

SEQ ID NO: 19310 - protein, 11 aa, Artificial
  helical interface sequence
IIAPSEASSNL

SEQ ID NO: 19311 - protein, 19 aa, Artificial
  helical interface sequence
YLKAQKVRRLITNDFLKAF

SEQ ID NO: 19312 - protein, 30 aa, Artificial; identical to SEQ ID NO: 10298
  helical interface sequence

SEQ ID NO: 19313 - protein, 14 aa, Artificial
  helical interface sequence
LKDYEDQQKQLEQV

SEQ ID NO: 19314 - protein, 6 aa, Artificial
  helical interface sequence
LYKMRT

SEQ ID NO: 19315 - protein, 11 aa, Artificial
  helical interface sequence
ACATLLSNILH

SEQ ID NO: 19316 - protein, 6 aa, Artificial
  helical interface sequence
LYKMRT

SEQ ID NO: 19317 - protein, 8 aa, Artificial
  helical interface sequence
EEYFRKAI

SEQ ID NO: 19318 - protein, 6 aa, Artificial
  helical interface sequence
DEQLKS

SEQ ID NO: 19319 - protein, 96 aa, Artificial; identical to SEQ ID NO: 202
  helical interface sequence

SEQ ID NO: 19320 - protein, 15 aa, Artificial
  helical interface sequence
LHDLVDYYYFWKEDG

SEQ ID NO: 19321 - protein, 11 aa, Artificial
  helical interface sequence
GEYRRRWKREV

SEQ ID NO: 19322 - protein, 5 aa, Artificial
  helical interface sequence
RLLDN

SEQ ID NO: 19323 - protein, 9 aa, Artificial
  helical interface sequence
YMQRRLINA

SEQ ID NO: 19324 - protein, 8 aa, Artificial
  helical interface sequence
VVENIIIG

SEQ ID NO: 19325 - protein, 11 aa, Artificial
  helical interface sequence
IEAAREIIIRE

SEQ ID NO: 19326 - protein, 10 aa, Artificial
  helical interface sequence
VKHIYEFLKA

SEQ ID NO: 19327 - protein, 8 aa, Artificial
  helical interface sequence
TVKHLLDA

SEQ ID NO: 19328 - protein, 11 aa, Artificial
  helical interface sequence
HTLGNLIAGTL

SEQ ID NO: 19329 - protein, 10 aa, Artificial
  helical interface sequence
FINIAQMSAC

SEQ ID NO: 19330 - protein, 7 aa, Artificial
  helical interface sequence
LIEKFLR

SEQ ID NO: 19331 - protein, 11 aa, Artificial
  helical interface sequence
ASFLKERLMEA

SEQ ID NO: 19332 - protein, 12 aa, Artificial
  helical interface sequence
HTLGNLIRAELL

SEQ ID NO: 19333 - protein, 10 aa, Artificial
  helical interface sequence
VNRCIEALDE

SEQ ID NO: 19334 - protein, 15 aa, Artificial
  helical interface sequence
GQEFRVQTMKWYAMF

SEQ ID NO: 19335 - protein, 9 aa, Artificial
  helical interface sequence
LLQQCFLEA

SEQ ID NO: 19336 - protein, 22 aa, Artificial
  helical interface sequence
RSMVEGQIEGGVTMGQGFVLME

SEQ ID NO: 19337 - protein, 18 aa, Artificial
  helical interface sequence
PENFRLLGNMIVIVLGHH

SEQ ID NO: 19338 - protein, 6 aa, Artificial
  helical interface sequence
SEQLTS

SEQ ID NO: 19339 - protein, 10 aa, Artificial
  helical interface sequence
TRFRAVFQKY

SEQ ID NO: 19340 - protein, 15 aa, Artificial
  helical interface sequence
CEEMIKRAVFARELG

SEQ ID NO: 19341 - protein, 5 aa, Artificial
  helical interface sequence
GHCTD

SEQ ID NO: 19342 - protein, 14 aa, Artificial
  helical interface sequence
RELVRAQIAICGMS

SEQ ID NO: 19343 - protein, 7 aa, Artificial
  helical interface sequence
LYQLENY

SEQ ID NO: 19344 - protein, 10 aa, Artificial
  helical interface sequence
AQLISHWKGN

SEQ ID NO: 19345 - protein, 15 aa, Artificial
  helical interface sequence
AATLEEKLNKIFEKL

SEQ ID NO: 19346 - protein, 6 aa, Artificial
  helical interface sequence
SEQLTS

SEQ ID NO: 19347 - protein, 20 aa, Artificial
  helical interface sequence
PENFKLLGNVMVIILATHFG

SEQ ID NO: 19348 - protein, 5 aa, Artificial
  helical interface sequence
DEQLK

SEQ ID NO: 19349 - protein, 6 aa, Artificial
  helical interface sequence
SEQLTS

SEQ ID NO: 19350 - protein, 9 aa, Artificial
  helical interface sequence
QDELESLAG

SEQ ID NO: 19351 - protein, 6 aa, Artificial
  helical interface sequence
KDCLIG

SEQ ID NO: 19352 - protein, 29 aa, Artificial
  helical interface sequence
SSAVMALQEASEAYLVALFEDTNLCAIHA

SEQ ID NO: 19353 - protein, 11 aa, Artificial
  helical interface sequence
LPVLEAVAKAG

SEQ ID NO: 19354 - protein, 6 aa, Artificial
  helical interface sequence
FEKLKK

SEQ ID NO: 19355 - protein, 14 aa, Artificial
  helical interface sequence
GELRVRAATTIAAN

SEQ ID NO: 19356 - protein, 14 aa, Artificial
  helical interface sequence
AAAIVKEAVAKSLL

SEQ ID NO: 19357 - protein, 13 aa, Artificial
  helical interface sequence
PGELDRIKSFVSS

SEQ ID NO: 19358 - protein, 8 aa, Artificial
  helical interface sequence
FQFAAGSM

SEQ ID NO: 19359 - protein, 8 aa, Artificial
  helical interface sequence
LFDYLNRY

SEQ ID NO: 19360 - protein, 5 aa, Artificial
  helical interface sequence
VSFIM

SEQ ID NO: 19361 - protein, 21 aa, Artificial
  helical interface sequence
FGSLLAVCLMTQILTGLLLAM

SEQ ID NO: 19362 - protein, 6 aa, Artificial
  helical interface sequence
YESIAY

SEQ ID NO: 19363 - protein, 5 aa, Artificial
  helical interface sequence
VPLHR

SEQ ID NO: 19364 - protein, 8 aa, Artificial
  helical interface sequence
LLGTLAKH

SEQ ID NO: 19365 - protein, 5 aa, Artificial
  helical interface sequence
TEQLA

SEQ ID NO: 19366 - protein, 26 aa, Artificial
  helical interface sequence
GWIIRYMHANGASMFFICLYMHVGRG

SEQ ID NO: 19367 - protein, 35 aa, Artificial; identical to SEQ ID NO: 5344
  helical interface sequence

SEQ ID NO: 19368 - protein, 9 aa, Artificial
  helical interface sequence
DWLATAAAR

SEQ ID NO: 19369 - protein, 13 aa, Artificial
  helical interface sequence
YWAASAIKEAKKY

SEQ ID NO: 19370 - protein, 12 aa, Artificial
  helical interface sequence
GRGQFAAVPLNI

SEQ ID NO: 19371 - protein, 5 aa, Artificial
  helical interface sequence
REETQ

SEQ ID NO: 19372 - protein, 9 aa, Artificial
  helical interface sequence
EEEVEQLVA

SEQ ID NO: 19373 - protein, 9 aa, Artificial
  helical interface sequence
FEDYVEGLR

SEQ ID NO: 19374 - protein, 9 aa, Artificial
  helical interface sequence
FEDYVEGLR

SEQ ID NO: 19375 - protein, 9 aa, Artificial
  helical interface sequence
ERELLESYI

SEQ ID NO: 19376 - protein, 20 aa, Artificial
  helical interface sequence
WRDRFLFVMDAVNKASAATG

SEQ ID NO: 19377 - protein, 14 aa, Artificial
  helical interface sequence
GRNYGRVVYEGLKG

SEQ ID NO: 19378 - protein, 20 aa, Artificial
  helical interface sequence
WRDRFLFVMDAVNKASAATG

SEQ ID NO: 19379 - protein, 5 aa, Artificial
  helical interface sequence
SRWWC

SEQ ID NO: 19380 - protein, 7 aa, Artificial
  helical interface sequence
SEQLTSG

SEQ ID NO: 19381 - protein, 5 aa, Artificial
  helical interface sequence
MKELE

SEQ ID NO: 19382 - protein, 6 aa, Artificial
  helical interface sequence
TEQLAT

SEQ ID NO: 19383 - protein, 7 aa, Artificial
  helical interface sequence
FKEICAV

SEQ ID NO: 19384 - protein, 7 aa, Artificial
  helical interface sequence
FKEICAV

SEQ ID NO: 19385 - protein, 7 aa, Artificial
  helical interface sequence
YDEIEQT

SEQ ID NO: 19386 - protein, 12 aa, Artificial
  helical interface sequence
WPDVEKRFKDMG

SEQ ID NO: 19387 - protein, 5 aa, Artificial
  helical interface sequence
SEQLT

SEQ ID NO: 19388 - protein, 12 aa, Artificial
  helical interface sequence
AAELRHVMTNLG

SEQ ID NO: 19389 - protein, 8 aa, Artificial
  helical interface sequence
YEEFVQMM

SEQ ID NO: 19390 - protein, 7 aa, Artificial
  helical interface sequence
YEEFVQM

SEQ ID NO: 19391 - protein, 19 aa, Artificial
  helical interface sequence
PHNFHLFADCIVVTLAVNL

SEQ ID NO: 19392 - protein, 25 aa, Artificial
  helical interface sequence
EPLQLHVDKAVSGLRSLTTLLRALG

SEQ ID NO: 19393 - protein, 13 aa, Artificial
  helical interface sequence
GSQIDALSALVAD

SEQ ID NO: 19394 - protein, 19 aa, Artificial
  helical interface sequence
SVLDDRCLNGLKETYLALG

SEQ ID NO: 19395 - protein, 13 aa, Artificial
  helical interface sequence
FSAADFVALDFLN

SEQ ID NO: 19396 - protein, 20 aa, Artificial
  helical interface sequence
EQKLKLYQSATQAVFQKRQA

SEQ ID NO: 19397 - protein, 11 aa, Artificial
  helical interface sequence
TIDEIIEAIEK

SEQ ID NO: 19398 - protein, 26 aa, Artificial
  helical interface sequence
IRARQNRAYLERDCPAQLQQLLELGR

SEQ ID NO: 19399 - protein, 17 aa, Artificial
  helical interface sequence
ERYNSQLLSFVRDLNQY

SEQ ID NO: 19400 - protein, 6 aa, Artificial
  helical interface sequence
DEQLKS

SEQ ID NO: 19401 - protein, 9 aa, Artificial
  helical interface sequence
EETIRNAFA

SEQ ID NO: 19402 - protein, 18 aa, Artificial
  helical interface sequence
QDEIDDLKDVFELFDFWD

SEQ ID NO: 19403 - protein, 15 aa, Artificial
  helical interface sequence
IFIQKKAVKNFTEVH

SEQ ID NO: 19404 - protein, 9 aa, Artificial
  helical interface sequence
FPSFIHSQK

SEQ ID NO: 19405 - protein, 19 aa, Artificial
  helical interface sequence
KMLQGRLFAYPDTHRHRLG

SEQ ID NO: 19406 - protein, 9 aa, Artificial
  helical interface sequence
FPSFIHSQK

SEQ ID NO: 19407 - protein, 6 aa, Artificial
  helical interface sequence
SQLRDL

SEQ ID NO: 19408 - protein, 6 aa, Artificial
  helical interface sequence
DEQLKS

SEQ ID NO: 19409 - protein, 11 aa, Artificial
  helical interface sequence
KKWIQKVIDQF

SEQ ID NO: 19410 - protein, 11 aa, Artificial
  helical interface sequence
KKWIQKVIDQF

SEQ ID NO: 19411 - protein, 11 aa, Artificial
  helical interface sequence
KKWIQKVIDQF

SEQ ID NO: 19412 - protein, 8 aa, Artificial
  helical interface sequence
RETAASLL

SEQ ID NO: 19413 - protein, 8 aa, Artificial
  helical interface sequence
EQWARLLQ

SEQ ID NO: 19414 - protein, 13 aa, Artificial
  helical interface sequence
AARRFEELAAKAG

SEQ ID NO: 19415 - protein, 10 aa, Artificial
  helical interface sequence
PRDAQHFTQR

SEQ ID NO: 19416 - protein, 15 aa, Artificial
  helical interface sequence
IGTVIESVVRRAIEA

SEQ ID NO: 19417 - protein, 13 aa, Artificial
  helical interface sequence
EVDLLEEELGHLT

SEQ ID NO: 19418 - protein, 7 aa, Artificial
  helical interface sequence
QRVLEQH

SEQ ID NO: 19419 - protein, 11 aa, Artificial
  helical interface sequence
ATGQMLAAILG

SEQ ID NO: 19420 - protein, 15 aa, Artificial
  helical interface sequence
PLAVAKILAAVARAE

SEQ ID NO: 19421 - protein, 16 aa, Artificial
  helical interface sequence
KTTLTAAITTVLAKTY

SEQ ID NO: 19422 - protein, 10 aa, Artificial
  helical interface sequence
HADYVKNMIT

SEQ ID NO: 19423 - protein, 5 aa, Artificial
  helical interface sequence
VPEMI

SEQ ID NO: 19424 - protein, 6 aa, Artificial
  helical interface sequence
LMEIAE

SEQ ID NO: 19425 - protein, 6 aa, Artificial
  helical interface sequence
PGKFTE

SEQ ID NO: 19426 - protein, 18 aa, Artificial
  helical interface sequence
LKQAEWTFGLMMNISDSL

SEQ ID NO: 19427 - protein, 12 aa, Artificial
  helical interface sequence
SEHENTFFRDIV

SEQ ID NO: 19428 - protein, 9 aa, Artificial
  helical interface sequence
GPLDEWGIA

SEQ ID NO: 19429 - protein, 19 aa, Artificial
  helical interface sequence
TPNLAEFAFSLYRQLAHQS

SEQ ID NO: 19430 - protein, 16 aa, Artificial
  helical interface sequence
NLLRAVSNMLQKARQT

SEQ ID NO: 19431 - protein, 6 aa, Artificial
  helical interface sequence
SEELET

SEQ ID NO: 19432 - protein, 11 aa, Artificial
  helical interface sequence
AMDVVYALKRQ

SEQ ID NO: 19433 - protein, 5 aa, Artificial
  helical interface sequence
RSQRA

SEQ ID NO: 19434 - protein, 7 aa, Artificial
  helical interface sequence
ATCDGFF

SEQ ID NO: 19435 - protein, 10 aa, Artificial
  helical interface sequence
RVALQAEKLD

SEQ ID NO: 19436 - protein, 17 aa, Artificial
  helical interface sequence
EKDIAAHIKKEFDKKYN

SEQ ID NO: 19437 - protein, 25 aa, Artificial
  helical interface sequence
SRRMAACLRDMEIVLRYVSYAMIAG

SEQ ID NO: 19438 - protein, 25 aa, Artificial
  helical interface sequence
SRRMAACLRDMEIVLRYVSYAMIAG

SEQ ID NO: 19439 - protein, 7 aa, Artificial
  helical interface sequence
SEQLTSG

SEQ ID NO: 19440 - protein, 7 aa, Artificial
  helical interface sequence
SEQLTSG

SEQ ID NO: 19441 - protein, 5 aa, Artificial
  helical interface sequence
VQAWI

SEQ ID NO: 19442 - protein, 11 aa, Artificial
  helical interface sequence
SLILTAFGLML

SEQ ID NO: 19443 - protein, 27 aa, Artificial
  helical interface sequence
VDYWIWSLQLSGIGTTLTGINFFVTIL

SEQ ID NO: 19444 - protein, 7 aa, Artificial
  helical interface sequence
RPILQGF

SEQ ID NO: 19445 - protein, 6 aa, Artificial
  helical interface sequence
VAFVLD

SEQ ID NO: 19446 - protein, 6 aa, Artificial
  helical interface sequence
PEEAAH

SEQ ID NO: 19447 - protein, 22 aa, Artificial
  helical interface sequence
ATDVTTLNEMFRYKTNLYKLKE

SEQ ID NO: 19448 - protein, 13 aa, Artificial
  helical interface sequence
FQVEYALEAIKQG

SEQ ID NO: 19449 - protein, 11 aa, Artificial
  helical interface sequence
LIMPFLDNQVN

SEQ ID NO: 19450 - protein, 18 aa, Artificial
  helical interface sequence
GPDYRVLVDKSRKVAHTS

SEQ ID NO: 19451 - protein, 21 aa, Artificial
  helical interface sequence
AADGDALVKRFKNSVKWYHFD

SEQ ID NO: 19452 - protein, 23 aa, Artificial
  helical interface sequence
APDARVLSNYLRQQCNYSSLVFN

SEQ ID NO: 19453 - protein, 20 aa, Artificial
  helical interface sequence
AADTQAIADIVQYHLELYTS

SEQ ID NO: 19454 - protein, 11 aa, Artificial
  helical interface sequence
FGAHMANPLLR

SEQ ID NO: 19455 - protein, 13 aa, Artificial
  helical interface sequence
VGELFWKVKEEEG

SEQ ID NO: 19456 - protein, 14 aa, Artificial
  helical interface sequence
QGTLFELILAANYL

SEQ ID NO: 19457 - protein, 10 aa, Artificial
  helical interface sequence
EEEEAQVRKE

SEQ ID NO: 19458 - protein, 11 aa, Artificial
  helical interface sequence
EEEEAQVRKEN

SEQ ID NO: 19459 - protein, 11 aa, Artificial
  helical interface sequence
EEEEAQVRKEN

SEQ ID NO: 19460 - protein, 6 aa, Artificial
  helical interface sequence
SEQLTS

SEQ ID NO: 19461 - protein, 20 aa, Artificial
  helical interface sequence
YAQASAELAKAIAQLRVIEL

SEQ ID NO: 19462 - protein, 5 aa, Artificial
  helical interface sequence
SEQLT

SEQ ID NO: 19463 - protein, 10 aa, Artificial
  helical interface sequence
ASSVAQVVTN

SEQ ID NO: 19464 - protein, 11 aa, Artificial
  helical interface sequence
QVRKYLVELRT

SEQ ID NO: 19465 - protein, 48 aa, Artificial
  helical interface sequence
FEDAMESIKSQKNELESTLQKMGENLRAITDIMMKLSPQAEELLAAVA

SEQ ID NO: 19466 - protein, 18 aa, Artificial
  helical interface sequence
RLGYTPVCRALHSLLLRL

SEQ ID NO: 19467 - protein, 7 aa, Artificial
  helical interface sequence
LIQVMAE

SEQ ID NO: 19468 - protein, 9 aa, Artificial
  helical interface sequence
AVPKAEWTN

SEQ ID NO: 19469 - protein, 23 aa, Artificial
  helical interface sequence
KEEITASLYRVVDDWIEDYASRI

SEQ ID NO: 19470 - protein, 9 aa, Artificial
  helical interface sequence
AVPKAEWTN

SEQ ID NO: 19471 - protein, 16 aa, Artificial
  helical interface sequence
QQEITTNLENHFKKSK

SEQ ID NO: 19472 - protein, 22 aa, Artificial
  helical interface sequence
NADSRILIEKARVEAQSHRLTL

SEQ ID NO: 19473 - protein, 23 aa, Artificial
  helical interface sequence
IPDARNAALRAKAEAAEFRYKYG

SEQ ID NO: 19474 - protein, 23 aa, Artificial
  helical interface sequence
AGDTVQFAEYIQANIQLYSIRED

SEQ ID NO: 19475 - protein, 6 aa, Artificial
  helical interface sequence
SGSTFI

SEQ ID NO: 19476 - protein, 17 aa, Artificial
  helical interface sequence
PSYIFEYLATVMYQRRS

SEQ ID NO: 19477 - protein, 12 aa, Artificial
  helical interface sequence
EKTKKFVEGTWK

SEQ ID NO: 19478 - protein, 13 aa, Artificial
  helical interface sequence
LLKSAVELAKDWR

SEQ ID NO: 19479 - protein, 13 aa, Artificial
  helical interface sequence
LLKSAVELAKDWR

SEQ ID NO: 19480 - protein, 15 aa, Artificial
  helical interface sequence
RQELIDQEKELLEKL

SEQ ID NO: 19481 - protein, 9 aa, Artificial
  helical interface sequence
GPMDEYLIA

SEQ ID NO: 19482 - protein, 14 aa, Artificial
  helical interface sequence
SNKRLDVVNRITSN

SEQ ID NO: 19483 - protein, 16 aa, Artificial
  helical interface sequence
ASTIVSNAARSLFAEQ

SEQ ID NO: 19484 - protein, 25 aa, Artificial
  helical interface sequence
SRRMAACLRDMEIILRYVTYAVFAG

SEQ ID NO: 19485 - protein, 12 aa, Artificial
  helical interface sequence
LEWIEEEKAKKQ

SEQ ID NO: 19486 - protein, 14 aa, Artificial
  helical interface sequence
SIDGKTVLFAALTG

SEQ ID NO: 19487 - protein, 7 aa, Artificial
  helical interface sequence
NTAAVEN

SEQ ID NO: 19488 - protein, 8 aa, Artificial
  helical interface sequence
PEVQTALH

SEQ ID NO: 19489 - protein, 15 aa, Artificial
  helical interface sequence
PECTEVWNKALAEQG

SEQ ID NO: 19490 - protein, 11 aa, Artificial
  helical interface sequence
KFIQRDTLAKG

SEQ ID NO: 19491 - protein, 16 aa, Artificial
  helical interface sequence
LAATDELLMTVSQLSG

SEQ ID NO: 19492 - protein, 6 aa, Artificial
  helical interface sequence
CPVGLI

SEQ ID NO: 19493 - protein, 7 aa, Artificial
  helical interface sequence
GCSESVL

SEQ ID NO: 19494 - protein, 5 aa, Artificial
  helical interface sequence
EDVEE

SEQ ID NO: 19495 - protein, 8 aa, Artificial
  helical interface sequence
FGYLADIC

SEQ ID NO: 19496 - protein, 19 aa, Artificial
  helical interface sequence
SAAPLVTATAFVQAIINEF

SEQ ID NO: 19497 - protein, 20 aa, Artificial
  helical interface sequence
PVNFKLLSQCIQVVLAVHMG

SEQ ID NO: 19498 - protein, 5 aa, Artificial
  helical interface sequence
CSSRG

SEQ ID NO: 19499 - protein, 11 aa, Artificial
  helical interface sequence
PEEVFEQVDKI

SEQ ID NO: 19500 - protein, 17 aa, Artificial
  helical interface sequence
TADAFTLFELFERKLEM

SEQ ID NO: 19501 - protein, 21 aa, Artificial
  helical interface sequence
DSQKKAIERMKDTLRITYLTE

SEQ ID NO: 19502 - protein, 14 aa, Artificial
  helical interface sequence
AEEKQLITGLWGKV

SEQ ID NO: 19503 - protein, 12 aa, Artificial
  helical interface sequence
ELGRPDAEYWNS

SEQ ID NO: 19504 - protein, 11 aa, Artificial
  helical interface sequence
TWNLADQLRTN

SEQ ID NO: 19505 - protein, 5 aa, Artificial
  helical interface sequence
FFVLG

SEQ ID NO: 19506 - protein, 25 aa, Artificial
  helical interface sequence
LKLQVLLDEEYKQLVKDRKFLREVF

SEQ ID NO: 19507 - protein, 22 aa, Artificial
  helical interface sequence
AQGALANIAVNKANLDVMKERS

SEQ ID NO: 19508 - protein, 8 aa, Artificial
  helical interface sequence
HADYLLRT

SEQ ID NO: 19509 - protein, 19 aa, Artificial
  helical interface sequence
FSEAREDMAALEKDYEEVG

SEQ ID NO: 19510 - protein, 9 aa, Artificial
  helical interface sequence
AVPRAILEL

SEQ ID NO: 19511 - protein, 5 aa, Artificial
  helical interface sequence
SEQLT

SEQ ID NO: 19512 - protein, 38 aa, Artificial
  helical interface sequence
KDFTEELIEKVKKYKALAREAALSKIGELASEIFAEFT

SEQ ID NO: 19513 - protein, 5 aa, Artificial
  helical interface sequence
SEQLT

SEQ ID NO: 19514 - protein, 14 aa, Artificial
  helical interface sequence
AKNYGRAVYECLRG

SEQ ID NO: 19515 - protein, 14 aa, Artificial
  helical interface sequence
DEQIAAQVDYIVAN

SEQ ID NO: 19516 - protein, 16 aa, Artificial
  helical interface sequence
YYWHWIRTYIHHGVRT

SEQ ID NO: 19517 - protein, 22 aa, Artificial
  helical interface sequence
IADAKTLIDKARVETQNHWFTY

SEQ ID NO: 19518 - protein, 18 aa, Artificial
  helical interface sequence
EEEAKNLVSEAIAAGIFN

SEQ ID NO: 19519 - protein, 15 aa, Artificial
  helical interface sequence
VVTANRMLKQMLFRY

SEQ ID NO: 19520 - protein, 23 aa, Artificial
  helical interface sequence
GPDYRVLVHRARKLAQQYYLVYQ

SEQ ID NO: 19521 - protein, 23 aa, Artificial
  helical interface sequence
LADARSLADIAREEASNFRSNFG

SEQ ID NO: 19522 - protein, 15 aa, Artificial
  helical interface sequence
YGAYLAQPLLREVLE

SEQ ID NO: 19523 - protein, 9 aa, Artificial
  helical interface sequence
AEQMYGMCE

SEQ ID NO: 19524 - protein, 6 aa, Artificial
  helical interface sequence
EELLKR

SEQ ID NO: 19525 - protein, 10 aa, Artificial
  helical interface sequence
PDEALLAVAH

SEQ ID NO: 19526 - protein, 6 aa, Artificial
  helical interface sequence
RKLVDV

SEQ ID NO: 19527 - protein, 20 aa, Artificial
  helical interface sequence
EIIIRNEKRMLQEAVDALLD

SEQ ID NO: 19528 - protein, 10 aa, Artificial
  helical interface sequence
EMEVWALEAY

SEQ ID NO: 19529 - protein, 23 aa, Artificial
  helical interface sequence
VLEYFISSHGARKGGADTALRTA

SEQ ID NO: 19530 - protein, 6 aa, Artificial
  helical interface sequence
SIVRRY

SEQ ID NO: 19531 - protein, 6 aa, Artificial
  helical interface sequence
DEEYRE

SEQ ID NO: 19532 - protein, 15 aa, Artificial
  helical interface sequence
GKNYGRVVYEALKGG

SEQ ID NO: 19533 - protein, 9 aa, Artificial
  helical interface sequence
VILERERLD

SEQ ID NO: 19534 - protein, 18 aa, Artificial
  helical interface sequence
WRERYLFTMEAVNKASAA

SEQ ID NO: 19535 - protein, 15 aa, Artificial
  helical interface sequence
PAAVLFEINACRKAR

SEQ ID NO: 19536 - protein, 9 aa, Artificial
  helical interface sequence
VILERERLD

SEQ ID NO: 19537 - protein, 10 aa, Artificial
  helical interface sequence
VSFMAWDAAN

SEQ ID NO: 19538 - protein, 7 aa, Artificial
  helical interface sequence
EAVFTDG

SEQ ID NO: 19539 - protein, 12 aa, Artificial
  helical interface sequence
EEEIREAFRVFD

SEQ ID NO: 19540 - protein, 10 aa, Artificial
  helical interface sequence
LEELKIMLQA

SEQ ID NO: 19541 - protein, 9 aa, Artificial
  helical interface sequence
FDEFLVMMV

SEQ ID NO: 19542 - protein, 10 aa, Artificial
  helical interface sequence
TRRIWYAIAM

SEQ ID NO: 19543 - protein, 22 aa, Artificial
  helical interface sequence
AADTEAVTQLIGSNIELHSLYT

SEQ ID NO: 19544 - protein, 22 aa, Artificial
  helical interface sequence
APDARVLSNYLRQQCNYSSLVF

SEQ ID NO: 19545 - protein, 21 aa, Artificial
  helical interface sequence
AADGDALVKRFKNSVKWYHFD

SEQ ID NO: 19546 - protein, 12 aa, Artificial
  helical interface sequence
SDQLFGMCESLY

SEQ ID NO: 19547 - protein, 18 aa, Artificial
  helical interface sequence
PEDLFETISQALLNAADR

SEQ ID NO: 19548 - protein, 22 aa, Artificial
  helical interface sequence
AGDTVQFAEYIQANIQLYSIRE

SEQ ID NO: 19549 - protein, 11 aa, Artificial
  helical interface sequence
SLAAMAVLESH

SEQ ID NO: 19550 - protein, 13 aa, Artificial
  helical interface sequence
YSGFYTFSLLDHH

SEQ ID NO: 19551 - protein, 15 aa, Artificial
  helical interface sequence
TKLLVSEVAKIMQEA

SEQ ID NO: 19552 - protein, 17 aa, Artificial
  helical interface sequence
PQAVSSFVRQELAKSIR

SEQ ID NO: 19553 - protein, 20 aa, Artificial
  helical interface sequence
ISDMQHIERLLKDLVTENAY

SEQ ID NO: 19554 - protein, 16 aa, Artificial
  helical interface sequence
PRFQRLFQCLLHRALH

SEQ ID NO: 19555 - protein, 11 aa, Artificial
  helical interface sequence
YHQRLRLLKSG

SEQ ID NO: 19556 - protein, 26 aa, Artificial
  helical interface sequence
PEAKSFYGFQIMIENIHSETYSLLID

SEQ ID NO: 19557 - protein, 12 aa, Artificial
  helical interface sequence
MQSVVKLLDDQL

SEQ ID NO: 19558 - protein, 17 aa, Artificial
  helical interface sequence
EHAIANFTKAEMALEFN

SEQ ID NO: 19559 - protein, 5 aa, Artificial
  helical interface sequence
APIVL

SEQ ID NO: 19560 - protein, 15 aa, Artificial
  helical interface sequence
INVVTCAAGILSNLT

SEQ ID NO: 19561 - protein, 17 aa, Artificial
  helical interface sequence
EKLLWTTSRVLKVLSVC

SEQ ID NO: 19562 - protein, 17 aa, Artificial
  helical interface sequence
PTDIQLYYQTLLIGRKE

SEQ ID NO: 19563 - protein, 8 aa, Artificial
  helical interface sequence
HRAARIAA

SEQ ID NO: 19564 - protein, 15 aa, Artificial
  helical interface sequence
KKQVLRMEHLVLKVL

SEQ ID NO: 19565 - protein, 6 aa, Artificial
  helical interface sequence
PVTEKH

SEQ ID NO: 19566 - protein, 18 aa, Artificial
  helical interface sequence
MDERNRQIAEIGASLIKH

SEQ ID NO: 19567 - protein, 19 aa, Artificial
  helical interface sequence
PENFRLLGNVLVCVLAHHF

SEQ ID NO: 19568 - protein, 14 aa, Artificial
  helical interface sequence
EVGGEALGRLLVVY

SEQ ID NO: 19569 - protein, 14 aa, Artificial
  helical interface sequence
EVGGEALGRLLVVY

SEQ ID NO: 19570 - protein, 14 aa, Artificial
  helical interface sequence
ETAVNDALLMSRIN

SEQ ID NO: 19571 - protein, 27 aa, Artificial
  helical interface sequence
GLWLIASFFMFVAVWSWWGRTYLRAQA

SEQ ID NO: 19572 - protein, 23 aa, Artificial
  helical interface sequence
LNDQVTLLKYGVHEIIYTMLASL

SEQ ID NO: 19573 - protein, 14 aa, Artificial
  helical interface sequence
KAGLAFLALARRYF

SEQ ID NO: 19574 - protein, 6 aa, Artificial
  helical interface sequence
SEQLTS

SEQ ID NO: 19575 - protein, 5 aa, Artificial
  helical interface sequence
HTVAA

SEQ ID NO: 19576 - protein, 6 aa, Artificial
  helical interface sequence
PQFGLN

SEQ ID NO: 19577 - protein, 10 aa, Artificial
  helical interface sequence
THFIESLEAI

SEQ ID NO: 19578 - protein, 10 aa, Artificial
  helical interface sequence
PAQMAKYHQF

SEQ ID NO: 19579 - protein, 10 aa, Artificial
  helical interface sequence
THFIESLEAI

SEQ ID NO: 19580 - protein, 11 aa, Artificial
  helical interface sequence
EAERLRAYLEG

SEQ ID NO: 19581 - protein, 29 aa, Artificial
  helical interface sequence
PEYWERETQKAKGNEQSFRVDLRTLLGYY

SEQ ID NO: 19582 - protein, 6 aa, Artificial
  helical interface sequence
SEQLTS

SEQ ID NO: 19583 - protein, 13 aa, Artificial
  helical interface sequence
FARHNLLQTLYNI

SEQ ID NO: 19584 - protein, 24 aa, Artificial
  helical interface sequence
LADQMSLLQSAWMEILILGVVYRS

SEQ ID NO: 19585 - protein, 13 aa, Artificial
  helical interface sequence
TVALREIRRYQKS

SEQ ID NO: 19586 - protein, 9 aa, Artificial
  helical interface sequence
KLLDNIQEY

SEQ ID NO: 19587 - protein, 6 aa, Artificial
  helical interface sequence
AGIKTR

SEQ ID NO: 19588 - protein, 23 aa, Artificial
  helical interface sequence
EEGKALVHHYEECAERVKIQQQQ

SEQ ID NO: 19589 - protein, 18 aa, Artificial
  helical interface sequence
IDDLIHFTLKQWNRLTIS

SEQ ID NO: 19590 - protein, 10 aa, Artificial
  helical interface sequence
LLPFYAILRS

SEQ ID NO: 19591 - protein, 15 aa, Artificial
  helical interface sequence
IELAFSSVEHIMRDV

SEQ ID NO: 19592 - protein, 16 aa, Artificial
  helical interface sequence
HASIRRGYQVYREVCA

SEQ ID NO: 19593 - protein, 27 aa, Artificial
  helical interface sequence
VGTIFAGAFVFQTVFDTAITSWYENHN

SEQ ID NO: 19594 - protein, 13 aa, Artificial
  helical interface sequence
PEDVVLAQEAVRL

SEQ ID NO: 19595 - protein, 7 aa, Artificial
  helical interface sequence
DRIEEGL

SEQ ID NO: 19596 - protein, 11 aa, Artificial
  helical interface sequence
LGLMTEKLSQK

SEQ ID NO: 19597 - protein, 8 aa, Artificial
  helical interface sequence
SYDCEVNA

SEQ ID NO: 19598 - protein, 18 aa, Artificial
  helical interface sequence
LLEEDKICGYVAGGLMYA

SEQ ID NO: 19599 - protein, 26 aa, Artificial
  helical interface sequence
TLGIHRLGLLLSLSAVFFSALCMIIT

SEQ ID NO: 19600 - protein, 18 aa, Artificial
  helical interface sequence
LLEEDKICGYVAGGLMYA

SEQ ID NO: 19601 - protein, 25 aa, Artificial
  helical interface sequence
AEDLQEALSSILGILKAVNDSMHLI

SEQ ID NO: 19602 - protein, 19 aa, Artificial
  helical interface sequence
PDSLENIPEKWTPEVKHFC

SEQ ID NO: 19603 - protein, 5 aa, Artificial
  helical interface sequence
AYLNR

SEQ ID NO: 19604 - protein, 26 aa, Artificial
  helical interface sequence
PSTWLPVIWIVATVVAIAVHAAVLAA

SEQ ID NO: 19605 - protein, 26 aa, Artificial
  helical interface sequence
PSTWLPVIWIVATVVAIAVHAAVLAA

SEQ ID NO: 19606 - protein, 26 aa, Artificial
  helical interface sequence
PSTWLPVIWIVATVVAIAVHAAVLAA

SEQ ID NO: 19607 - protein, 26 aa, Artificial
  helical interface sequence
PSTWLPVIWIVATVVAIAVHAAVLAA

SEQ ID NO: 19608 - protein, 14 aa, Artificial
  helical interface sequence
PSLLNMYKELENTI

SEQ ID NO: 19609 - protein, 9 aa, Artificial
  helical interface sequence
PEEVEEVIG

SEQ ID NO: 19610 - protein, 10 aa, Artificial
  helical interface sequence
YKNKMMVCQV

SEQ ID NO: 19611 - protein, 6 aa, Artificial
  helical interface sequence
KEWDKV

SEQ ID NO: 19612 - protein, 12 aa, Artificial
  helical interface sequence
VKKIAGYLSDYY

SEQ ID NO: 19613 - protein, 24 aa, Artificial
  helical interface sequence
PEYKNYFQYLKERITNQVQLLLTH

SEQ ID NO: 19614 - protein, 12 aa, Artificial
  helical interface sequence
KNLQLEKAASYI

SEQ ID NO: 19615 - protein, 10 aa, Artificial
  helical interface sequence
EKARKDRNKH

SEQ ID NO: 19616 - protein, 11 aa, Artificial
  helical interface sequence
LWHLRSLVFTD

SEQ ID NO: 19617 - protein, 13 aa, Artificial
  helical interface sequence
EMLAEIITNQIPK

SEQ ID NO: 19618 - protein, 6 aa, Artificial
  helical interface sequence
SEQLTG

SEQ ID NO: 19619 - protein, 12 aa, Artificial
  helical interface sequence
HHDMEVVLEKLK

SEQ ID NO: 19620 - protein, 11 aa, Artificial
  helical interface sequence
FFDVHQWIKNE

SEQ ID NO: 19621 - protein, 15 aa, Artificial
  helical interface sequence
GSNIKTAVKNIFSLY

SEQ ID NO: 19622 - protein, 14 aa, Artificial
  helical interface sequence
LGDLPPILNRKRAQ

SEQ ID NO: 19623 - protein, 7 aa, Artificial
  helical interface sequence
PLQQAQA

SEQ ID NO: 19624 - protein, 9 aa, Artificial
  helical interface sequence
KWEAEKIHI

SEQ ID NO: 19625 - protein, 26 aa, Artificial
  helical interface sequence
KTRRHVTFSKRKHGIMKKAFELSVLT

SEQ ID NO: 19626 - protein, 15 aa, Artificial
  helical interface sequence
KWEAEKIHIGFRQAY

SEQ ID NO: 19627 - protein, 12 aa, Artificial
  helical interface sequence
FTVFLTMFGEKL

SEQ ID NO: 19628 - protein, 10 aa, Artificial
  helical interface sequence
DFKEAFLLFD

SEQ ID NO: 19629 - protein, 5 aa, Artificial
  helical interface sequence
LQDRG

SEQ ID NO: 19630 - protein, 14 aa, Artificial
  helical interface sequence
IVATDVCQFLELCQ

SEQ ID NO: 19631 - protein, 9 aa, Artificial
  helical interface sequence
IFESFVDYV

SEQ ID NO: 19632 - protein, 15 aa, Artificial
  helical interface sequence
IETVGAEIADHVMDD

SEQ ID NO: 19633 - protein, 6 aa, Artificial
  helical interface sequence
SEQLTS

SEQ ID NO: 19634 - protein, 12 aa, Artificial
  helical interface sequence
PAGLLAAYRFLI

SEQ ID NO: 19635 - protein, 30 aa, Artificial; identical to SEQ ID NO: 12597
  helical interface sequence

SEQ ID NO: 19636 - protein, 12 aa, Artificial
  helical interface sequence
EDDSKLASRKYA

SEQ ID NO: 19637 - protein, 12 aa, Artificial
  helical interface sequence
HTLGNLIRAELL

SEQ ID NO: 19638 - protein, 15 aa, Artificial
  helical interface sequence
EEQIAEFKEAFSLFD

SEQ ID NO: 19639 - protein, 22 aa, Artificial
  helical interface sequence
LPHMADMSTYMFKGIISFAKVI

SEQ ID NO: 19640 - protein, 7 aa, Artificial
  helical interface sequence
YNRIRSG

SEQ ID NO: 19641 - protein, 23 aa, Artificial
  helical interface sequence
DWYLKGRLTSLESQFINALGILE

SEQ ID NO: 19642 - protein, 11 aa, Artificial
  helical interface sequence
KQHIEYARNLG

SEQ ID NO: 19643 - protein, 14 aa, Artificial
  helical interface sequence
EVRQFRRLFAQLAG

SEQ ID NO: 19644 - protein, 7 aa, Artificial
  helical interface sequence
PIMNVLR

SEQ ID NO: 19645 - protein, 12 aa, Artificial
  helical interface sequence
FTVFLTMFGEKL

SEQ ID NO: 19646 - protein, 16 aa, Artificial
  helical interface sequence
AIVVGRILTEVIKKEA

SEQ ID NO: 19647 - protein, 7 aa, Artificial
  helical interface sequence
FDIEEEL

SEQ ID NO: 19648 - protein, 36 aa, Artificial; identical to SEQ ID NO: 17314
  helical interface sequence

SEQ ID NO: 19649 - protein, 30 aa, Artificial; identical to SEQ ID NO: 4094
  helical interface sequence

SEQ ID NO: 19650 - protein, 30 aa, Artificial; identical to SEQ ID NO: 4094
  helical interface sequence

SEQ ID NO: 19651 - protein, 9 aa, Artificial
  helical interface sequence
EEEVETVLA

SEQ ID NO: 19652 - protein, 29 aa, Artificial
  helical interface sequence
MTLSISVLLSLTVFLLVIVELIPSTSSAV

SEQ ID NO: 19653 - protein, 29 aa, Artificial
  helical interface sequence
MSTAISVLLAQAVFLLLTSQRLPETALAV

SEQ ID NO: 19654 - protein, 29 aa, Artificial
  helical interface sequence
MTLSISVLLSLTVFLLVIVELIPSTSSAV

SEQ ID NO: 19655 - protein, 8 aa, Artificial
  helical interface sequence
TKDLLKKF

SEQ ID NO: 19656 - protein, 15 aa, Artificial
  helical interface sequence
QSVMEELKRIIIDSE

SEQ ID NO: 19657 - protein, 5 aa, Artificial
  helical interface sequence
PKSLS

SEQ ID NO: 19658 - protein, 14 aa, Artificial
  helical interface sequence
EEQRNAKIKSIRDD

SEQ ID NO: 19659 - protein, 16 aa, Artificial
  helical interface sequence
ATDRCCFVHDCCYGTV

SEQ ID NO: 19660 - protein, 5 aa, Artificial
  helical interface sequence
EQYFD

SEQ ID NO: 19661 - protein, 15 aa, Artificial
  helical interface sequence
VPDVVQEAFIKAYRA

SEQ ID NO: 19662 - protein, 14 aa, Artificial
  helical interface sequence
SEELRQIVFRTIES

SEQ ID NO: 19663 - protein, 14 aa, Artificial
  helical interface sequence
AGLLALIEGHLAGL

SEQ ID NO: 19664 - protein, 16 aa, Artificial
  helical interface sequence
IDEIGPLALARVLIVY

SEQ ID NO: 19665 - protein, 16 aa, Artificial
  helical interface sequence
ADQARELINSWVESQT

SEQ ID NO: 19666 - protein, 20 aa, Artificial
  helical interface sequence
PKRVEELQNKIVNCLKDHVT

SEQ ID NO: 19667 - protein, 14 aa, Artificial
  helical interface sequence
INPINTFTKFLLDH

SEQ ID NO: 19668 - protein, 26 aa, Artificial
  helical interface sequence
FSKGLIIQFIDQAQTTFAQMQRQLDG

SEQ ID NO: 19669 - protein, 18 aa, Artificial
  helical interface sequence
LTELDNLGHFLKGSSAAL

SEQ ID NO: 19670 - protein, 26 aa, Artificial
  helical interface sequence
FSKGLIIQFIDQAQTTFAQMQRQLDG

SEQ ID NO: 19671 - protein, 18 aa, Artificial
  helical interface sequence
LTELDNLGHFLKGSSAAL

SEQ ID NO: 19672 - protein, 7 aa, Artificial
  helical interface sequence
TLFELIL

SEQ ID NO: 19673 - protein, 9 aa, Artificial
  helical interface sequence
DHYFALVSR

SEQ ID NO: 19674 - protein, 8 aa, Artificial
  helical interface sequence
TELTNVVG

SEQ ID NO: 19675 - protein, 9 aa, Artificial
  helical interface sequence
DHYFALVSR

SEQ ID NO: 19676 - protein, 12 aa, Artificial
  helical interface sequence
EEVLMSLVIEMG

SEQ ID NO: 19677 - protein, 9 aa, Artificial
  helical interface sequence
VYMLELETS

SEQ ID NO: 19678 - protein, 13 aa, Artificial
  helical interface sequence
IREMLPVLEAVAK

SEQ ID NO: 19679 - protein, 13 aa, Artificial
  helical interface sequence
IREMLPVLEAVAK

SEQ ID NO: 19680 - protein, 6 aa, Artificial
  helical interface sequence
DEQLKS

SEQ ID NO: 19681 - protein, 13 aa, Artificial
  helical interface sequence
NTQLDALSKMVSE

SEQ ID NO: 19682 - protein, 22 aa, Artificial
  helical interface sequence
VGDAQVLVRYMKAELELYRLQR

SEQ ID NO: 19683 - protein, 18 aa, Artificial
  helical interface sequence
IENLVKRVADQMQQYTQY

SEQ ID NO: 19684 - protein, 11 aa, Artificial
  helical interface sequence
EDIEDLMKDSD

SEQ ID NO: 19685 - protein, 5 aa, Artificial
  helical interface sequence
WPEWW

SEQ ID NO: 19686 - protein, 7 aa, Artificial
  helical interface sequence
PAVFLRD

SEQ ID NO: 19687 - protein, 12 aa, Artificial
  helical interface sequence
PMEVMLRAVFMQ

SEQ ID NO: 19688 - protein, 14 aa, Artificial
  helical interface sequence
LMNQIRSQLAQLNG

SEQ ID NO: 19689 - protein, 19 aa, Artificial
  helical interface sequence
GRSLANAYAQTLGTIFTEQ

SEQ ID NO: 19690 - protein, 19 aa, Artificial
  helical interface sequence
GRSLANAYAQTLGTIFTEQ

SEQ ID NO: 19691 - protein, 8 aa, Artificial
  helical interface sequence
DNRYIRAV

SEQ ID NO: 19692 - protein, 7 aa, Artificial
  helical interface sequence
PEFHALR

SEQ ID NO: 19693 - protein, 11 aa, Artificial
  helical interface sequence
YHQRLRLLKSG

SEQ ID NO: 19694 - protein, 28 aa, Artificial
  helical interface sequence
GWLIRSIHRWSASMMVLMMVLHVFRVYL

SEQ ID NO: 19695 - protein, 8 aa, Artificial
  helical interface sequence
AARLATEF

SEQ ID NO: 19696 - protein, 13 aa, Artificial
  helical interface sequence
YTDFAAWVKENLD

SEQ ID NO: 19697 - protein, 6 aa, Artificial
  helical interface sequence
PEEAAH

SEQ ID NO: 19698 - protein, 20 aa, Artificial
  helical interface sequence
ANSNARAVSIMKACAVAFVN

SEQ ID NO: 19699 - protein, 14 aa, Artificial
  helical interface sequence
PRTILGTISAAKNE

SEQ ID NO: 19700 - protein, 12 aa, Artificial
  helical interface sequence
VTELVEEVLDKS

SEQ ID NO: 19701 - protein, 27 aa, Artificial
  helical interface sequence
WAGQLHFWMMFIGSNLIFFPQHFLGRQ

SEQ ID NO: 19702 - protein, 10 aa, Artificial
  helical interface sequence
IEYIKDLLEN

SEQ ID NO: 19703 - protein, 9 aa, Artificial
  helical interface sequence
KLMYTRLLK

SEQ ID NO: 19704 - protein, 9 aa, Artificial
  helical interface sequence
KLMYTRLLK

SEQ ID NO: 19705 - protein, 17 aa, Artificial
  helical interface sequence
AYVIEDLLHFCRCMYSM

SEQ ID NO: 19706 - protein, 7 aa, Artificial
  helical interface sequence
GLFYSIF

SEQ ID NO: 19707 - protein, 13 aa, Artificial
  helical interface sequence
YKEKEDFRDLIRQ

SEQ ID NO: 19708 - protein, 9 aa, Artificial
  helical interface sequence
ATGTEILKN

SEQ ID NO: 19709 - protein, 13 aa, Artificial
  helical interface sequence
WNLQPLLQSAQLT

SEQ ID NO: 19710 - protein, 13 aa, Artificial
  helical interface sequence
WNLQSLLLSAQIT

SEQ ID NO: 19711 - protein, 12 aa, Artificial
  helical interface sequence
LQSLLLSAQITG

SEQ ID NO: 19712 - protein, 8 aa, Artificial
  helical interface sequence
LERFVAMN

SEQ ID NO: 19713 - protein, 14 aa, Artificial
  helical interface sequence
TDQLARQVDYLLNN

SEQ ID NO: 19714 - protein, 21 aa, Artificial
  helical interface sequence
RLPALRSIGLKCLEHLFFFKL

SEQ ID NO: 19715 - protein, 7 aa, Artificial
  helical interface sequence
LLGEIAQ

SEQ ID NO: 19716 - protein, 6 aa, Artificial
  helical interface sequence
SEQLTS

SEQ ID NO: 19717 - protein, 14 aa, Artificial
  helical interface sequence
QNGLEQAKKFHEAV

SEQ ID NO: 19718 - protein, 15 aa, Artificial
  helical interface sequence
LSATEEILQEVRASG

SEQ ID NO: 19719 - protein, 13 aa, Artificial
  helical interface sequence
QEQLLSEVEYLLK

SEQ ID NO: 19720 - protein, 8 aa, Artificial
  helical interface sequence
REETFIAH

SEQ ID NO: 19721 - protein, 21 aa, Artificial
  helical interface sequence
VSRVSQLKAKALERLREMLSN

SEQ ID NO: 19722 - protein, 12 aa, Artificial
  helical interface sequence
NLFQALIDIQEF

SEQ ID NO: 19723 - protein, 17 aa, Artificial
  helical interface sequence
KQDTQRALHLLEEYRSK

SEQ ID NO: 19724 - protein, 5 aa, Artificial
  helical interface sequence
SIVIW

SEQ ID NO: 19725 - protein, 10 aa, Artificial
  helical interface sequence
YEELREQLSS

SEQ ID NO: 19726 - protein, 22 aa, Artificial
  helical interface sequence
QKSTQNAINGITNKVNSVIEKM

SEQ ID NO: 19727 - protein, 22 aa, Artificial
  helical interface sequence
QKSTQNAINGITNKVNSVIEKM

SEQ ID NO: 19728 - protein, 22 aa, Artificial
  helical interface sequence
QKSTQNAINGITNKVNSVIEKM

SEQ ID NO: 19729 - protein, 22 aa, Artificial
  helical interface sequence
QKSTQNAINGITNKVNSVIEKM

SEQ ID NO: 19730 - protein, 53 aa, Artificial; identical to SEQ ID NO: 171
  helical interface sequence

SEQ ID NO: 19731 - protein, 10 aa, Artificial
  helical interface sequence
YEELREQLSS

SEQ ID NO: 19732 - protein, 14 aa, Artificial
  helical interface sequence
FGAHMANPLLRKVV

SEQ ID NO: 19733 - protein, 15 aa, Artificial
  helical interface sequence
VAAASKILSNLVYQY

SEQ ID NO: 19734 - protein, 19 aa, Artificial
  helical interface sequence
KEETVDFIKHSLSQAIKWD

SEQ ID NO: 19735 - protein, 18 aa, Artificial
  helical interface sequence
KEEAIKLASDAIQAGIWN

SEQ ID NO: 19736 - protein, 12 aa, Artificial
  helical interface sequence
SDQLFGMCESLY

SEQ ID NO: 19737 - protein, 22 aa, Artificial
  helical interface sequence
TADARSMIEHARTAAVTHNLYY

SEQ ID NO: 19738 - protein, 15 aa, Artificial
  helical interface sequence
TETAASVFKELCYEN

SEQ ID NO: 19739 - protein, 22 aa, Artificial
  helical interface sequence
GDTVQFAEYIQANIQLYSIRED

SEQ ID NO: 19740 - protein, 7 aa, Artificial
  helical interface sequence
DEQLKSG

SEQ ID NO: 19741 - protein, 8 aa, Artificial
  helical interface sequence
AVARGLAS

SEQ ID NO: 19742 - protein, 15 aa, Artificial
  helical interface sequence
IFYAELARGIEDIAT

SEQ ID NO: 19743 - protein, 20 aa, Artificial
  helical interface sequence
DEQKRALSAGLLRVISEATG

SEQ ID NO: 19744 - protein, 11 aa, Artificial
  helical interface sequence
PQVVISFYEER

SEQ ID NO: 19745 - protein, 19 aa, Artificial
  helical interface sequence
GPEASQAQAMTFLIRDQKL

SEQ ID NO: 19746 - protein, 11 aa, Artificial
  helical interface sequence
LWERFCNWVTS

SEQ ID NO: 19747 - protein, 24 aa, Artificial
  helical interface sequence
TVLSSSIAAVFFAAFVVAGTMWYG

SEQ ID NO: 19748 - protein, 24 aa, Artificial
  helical interface sequence
RTSLYLGLLLILVLALLFSSYFFN

SEQ ID NO: 19749 - protein, 7 aa, Artificial
  helical interface sequence
LNKIKND

SEQ ID NO: 19750 - protein, 7 aa, Artificial
  helical interface sequence
LNKIKND

SEQ ID NO: 19751 - protein, 5 aa, Artificial
  helical interface sequence
YDDIV

SEQ ID NO: 19752 - protein, 30 aa, Artificial; identical to SEQ ID NO: 15646
  helical interface sequence

SEQ ID NO: 19753 - protein, 8 aa, Artificial
  helical interface sequence
ALHVAAAK

SEQ ID NO: 19754 - protein, 8 aa, Artificial
  helical interface sequence
RDEIKAAL

SEQ ID NO: 19755 - protein, 8 aa, Artificial
  helical interface sequence
RDEIKAAL

SEQ ID NO: 19756 - protein, 15 aa, Artificial
  helical interface sequence
ADQKDLLRMSWGVLS

SEQ ID NO: 19757 - protein, 15 aa, Artificial
  helical interface sequence
LSKQAAAYRQLSLLL

SEQ ID NO: 19758 - protein, 14 aa, Artificial
  helical interface sequence
PQAHVIENLHAAAY

SEQ ID NO: 19759 - protein, 21 aa, Artificial
  helical interface sequence
DSQIEKERDVILQELQENDTS

SEQ ID NO: 19760 - protein, 11 aa, Artificial
  helical interface sequence
LAEWESRIAEV

SEQ ID NO: 19761 - protein, 19 aa, Artificial
  helical interface sequence
VPTASLWGAVGAVGLVWAT

SEQ ID NO: 19762 - protein, 37 aa, Artificial; identical to SEQ ID NO: 288
  helical interface sequence

SEQ ID NO: 19763 - protein, 6 aa, Artificial
  helical interface sequence
AKMYLG

SEQ ID NO: 19764 - protein, 6 aa, Artificial
  helical interface sequence
AKMYLG

SEQ ID NO: 19765 - protein, 15 aa, Artificial
  helical interface sequence
AKNYGRAVYECLRGG

SEQ ID NO: 19766 - protein, 14 aa, Artificial
  helical interface sequence
NAAQNALRRVIERY

SEQ ID NO: 19767 - protein, 12 aa, Artificial
  helical interface sequence
DHAVTVLKKTLK

SEQ ID NO: 19768 - protein, 11 aa, Artificial
  helical interface sequence
EAELQDMINEV

SEQ ID NO: 19769 - protein, 14 aa, Artificial
  helical interface sequence
PEEFMLVYKFARKH

SEQ ID NO: 19770 - protein, 9 aa, Artificial
  helical interface sequence
ALQDSFRRH

SEQ ID NO: 19771 - protein, 7 aa, Artificial
  helical interface sequence
SEQLTSG

SEQ ID NO: 19772 - protein, 5 aa, Artificial
  helical interface sequence
LSQIT

SEQ ID NO: 19773 - protein, 15 aa, Artificial
  helical interface sequence
VETARCTAGTLHNLS

SEQ ID NO: 19774 - protein, 17 aa, Artificial
  helical interface sequence
EKLLWTTSRVLKVLSVC

SEQ ID NO: 19775 - protein, 13 aa, Artificial
  helical interface sequence
ACEIRALARQWAK

SEQ ID NO: 19776 - protein, 17 aa, Artificial
  helical interface sequence
PYLIAFLVDIYEDMLEN

SEQ ID NO: 19777 - protein, 17 aa, Artificial
  helical interface sequence
DKFRDVYDYFRAVLQRD

SEQ ID NO: 19778 - protein, 14 aa, Artificial
  helical interface sequence
INPINTFTKFLLDH

SEQ ID NO: 19779 - protein, 9 aa, Artificial
  helical interface sequence
VNLYQNYSE

SEQ ID NO: 19780 - protein, 29 aa, Artificial
  helical interface sequence
SSAVMALQEACEAYLVGLFEDTNLCAIHA

SEQ ID NO: 19781 - protein, 14 aa, Artificial
  helical interface sequence
LDDLEKSIDMLKSL

SEQ ID NO: 19782 - protein, 17 aa, Artificial
  helical interface sequence
LAVRKRTIIALGHLVMS

SEQ ID NO: 19783 - protein, 8 aa, Artificial
  helical interface sequence
VDDLRRLC

SEQ ID NO: 19784 - protein, 6 aa, Artificial
  helical interface sequence
VEEFVS

SEQ ID NO: 19785 - protein, 14 aa, Artificial
  helical interface sequence
PSLRNVLAAVKNCY

SEQ ID NO: 19786 - protein, 14 aa, Artificial
  helical interface sequence
LFLVAAHEIGHSLG

SEQ ID NO: 19787 - protein, 14 aa, Artificial
  helical interface sequence
GDFNALSNMFTQLS

SEQ ID NO: 19788 - protein, 14 aa, Artificial
  helical interface sequence
VPPAAGAAISMKLL

SEQ ID NO: 19789 - protein, 60 aa, Artificial; identical to SEQ ID NO: 412
  helical interface sequence

SEQ ID NO: 19790 - protein, 7 aa, Artificial
  helical interface sequence
IGPILHS

SEQ ID NO: 19791 - protein, 9 aa, Artificial
  helical interface sequence
RPDAEYWNS

SEQ ID NO: 19792 - protein, 17 aa, Artificial
  helical interface sequence
NQRRISSAKFLGELYNY

SEQ ID NO: 19793 - protein, 6 aa, Artificial
  helical interface sequence
AEQLAS

SEQ ID NO: 19794 - protein, 10 aa, Artificial
  helical interface sequence
PELAAACEVW

SEQ ID NO: 19795 - protein, 12 aa, Artificial
  helical interface sequence
GGDVIRSACKWS

SEQ ID NO: 19796 - protein, 10 aa, Artificial
  helical interface sequence
PELAAACEVW

SEQ ID NO: 19797 - protein, 10 aa, Artificial
  helical interface sequence
PELAAACEVW

SEQ ID NO: 19798 - protein, 14 aa, Artificial
  helical interface sequence
PKLVKVVEKALLEG

SEQ ID NO: 19799 - protein, 11 aa, Artificial
  helical interface sequence
LEREVMLAARK

SEQ ID NO: 19800 - protein, 5 aa, Artificial
  helical interface sequence
DEEQA

SEQ ID NO: 19801 - protein, 33 aa, Artificial; identical to SEQ ID NO: 7844
  helical interface sequence

SEQ ID NO: 19802 - protein, 12 aa, Artificial
  helical interface sequence
SMKDFEEMRKAG

SEQ ID NO: 19803 - protein, 28 aa, Artificial
  helical interface sequence
KWRLLAMMTLFFGSGFAAPFFIVRHQLL

SEQ ID NO: 19804 - protein, 6 aa, Artificial
  helical interface sequence
LDNYKK

SEQ ID NO: 19805 - protein, 32 aa, Artificial; identical to SEQ ID NO: 1080
  helical interface sequence

SEQ ID NO: 19806 - protein, 28 aa, Artificial
  helical interface sequence
DTWAKIHFAIMFVGVNMTFFPQHFLGLS

SEQ ID NO: 19807 - protein, 14 aa, Artificial
  helical interface sequence
PKIIDAALRACRRL

SEQ ID NO: 19808 - protein, 12 aa, Artificial
  helical interface sequence
SMKDFEEMRKAG

SEQ ID NO: 19809 - protein, 14 aa, Artificial
  helical interface sequence
GQVRLLLGALQSLL

SEQ ID NO: 19810 - protein, 6 aa, Artificial
  helical interface sequence
SEQLTS

SEQ ID NO: 19811 - protein, 5 aa, Artificial
  helical interface sequence
LESFL

SEQ ID NO: 19812 - protein, 5 aa, Artificial
  helical interface sequence
ENMYS

SEQ ID NO: 19813 - protein, 15 aa, Artificial
  helical interface sequence
PEIALELLMAANFLD

SEQ ID NO: 19814 - protein, 17 aa, Artificial
  helical interface sequence
LGVLLMASVPLGLILVP

SEQ ID NO: 19815 - protein, 25 aa, Artificial
  helical interface sequence
PNRVKWMIAFICLVMLAQLMLILKK

SEQ ID NO: 19816 - protein, 7 aa, Artificial
  helical interface sequence
VLGLVFA

SEQ ID NO: 19817 - protein, 21 aa, Artificial
  helical interface sequence
WVALLVVFTWSIAMVVWGRNG

SEQ ID NO: 19818 - protein, 5 aa, Artificial
  helical interface sequence
YAAQL

SEQ ID NO: 19819 - protein, 5 aa, Artificial
  helical interface sequence
YELVE

SEQ ID NO: 19820 - protein, 9 aa, Artificial
  helical interface sequence
IPKVYELVE

SEQ ID NO: 19821 - protein, 6 aa, Artificial
  helical interface sequence
GNYAYA

SEQ ID NO: 19822 - protein, 19 aa, Artificial
  helical interface sequence
LDDACEHLAEYLEVYWRAT

SEQ ID NO: 19823 - protein, 6 aa, Artificial
  helical interface sequence
KAVMKA

SEQ ID NO: 19824 - protein, 11 aa, Artificial
  helical interface sequence
YHQRLRLLKSG

SEQ ID NO: 19825 - protein, 11 aa, Artificial
  helical interface sequence
TLQLAVICKQF

SEQ ID NO: 19826 - protein, 13 aa, Artificial
  helical interface sequence
FFGHIWHGARTLF

SEQ ID NO: 19827 - protein, 25 aa, Artificial
  helical interface sequence
VRWVAVHTLAVPTIFFLGAIAAMQF

SEQ ID NO: 19828 - protein, 13 aa, Artificial
  helical interface sequence
FFGHIWHGARTLF

SEQ ID NO: 19829 - protein, 25 aa, Artificial
  helical interface sequence
VRWVAVHTLAVPTIFFLGAIAAMQF

SEQ ID NO: 19830 - protein, 7 aa, Artificial
  helical interface sequence
EESIRDN

SEQ ID NO: 19831 - protein, 7 aa, Artificial
  helical interface sequence
KSIAKTL

SEQ ID NO: 19832 - protein, 11 aa, Artificial
  helical interface sequence
EMERDCMIAHG

SEQ ID NO: 19833 - protein, 11 aa, Artificial
  helical interface sequence
KDEMRMTFKEA

SEQ ID NO: 19834 - protein, 15 aa, Artificial
  helical interface sequence
LKDAINEALRDWVAT

SEQ ID NO: 19835 - protein, 16 aa, Artificial
  helical interface sequence
IEPLKELEKAYKRFKD

SEQ ID NO: 19836 - protein, 15 aa, Artificial
  helical interface sequence
VRELLPILEQVAQTG

SEQ ID NO: 19837 - protein, 7 aa, Artificial
  helical interface sequence
RKFLMEC

SEQ ID NO: 19838 - protein, 13 aa, Artificial
  helical interface sequence
EEEIAELLELARD

SEQ ID NO: 19839 - protein, 8 aa, Artificial
  helical interface sequence
LSGVLSSL

SEQ ID NO: 19840 - protein, 11 aa, Artificial
  helical interface sequence
EHQLRQLNDMG

SEQ ID NO: 19841 - protein, 6 aa, Artificial
  helical interface sequence
DGDREL

SEQ ID NO: 19842 - protein, 19 aa, Artificial
  helical interface sequence
ELFDQCENKRRTLFKLASE

SEQ ID NO: 19843 - protein, 5 aa, Artificial
  helical interface sequence
PIFHR

SEQ ID NO: 19844 - protein, 11 aa, Artificial
  helical interface sequence
ALDLAKGLLEL

SEQ ID NO: 19845 - protein, 6 aa, Artificial
  helical interface sequence
SEQLTS

SEQ ID NO: 19846 - protein, 14 aa, Artificial
  helical interface sequence
FEEATAEAYRYAAL

SEQ ID NO: 19847 - protein, 5 aa, Artificial
  helical interface sequence
KEINS

SEQ ID NO: 19848 - protein, 15 aa, Artificial
  helical interface sequence
EPLLEALKIYIRKRR

SEQ ID NO: 19849 - protein, 21 aa, Artificial
  helical interface sequence
RLPALRSIGLKCLEHLFFFKL

SEQ ID NO: 19850 - protein, 16 aa, Artificial
  helical interface sequence
LEKAMKILEEIRKKQG

SEQ ID NO: 19851 - protein, 8 aa, Artificial
  helical interface sequence
LTEIKKQI

SEQ ID NO: 19852 - protein, 13 aa, Artificial
  helical interface sequence
SAEFIKNLSSIRR

SEQ ID NO: 19853 - protein, 8 aa, Artificial
  helical interface sequence
LTEIKKQI

SEQ ID NO: 19854 - protein, 8 aa, Artificial
  helical interface sequence
LTEIKKQI

SEQ ID NO: 19855 - protein, 13 aa, Artificial
  helical interface sequence
SAEFIKNLSSIRR

SEQ ID NO: 19856 - protein, 8 aa, Artificial
  helical interface sequence
LTEIKKQI

SEQ ID NO: 19857 - protein, 13 aa, Artificial
  helical interface sequence
DEFAKKESVKKIA

SEQ ID NO: 19858 - protein, 24 aa, Artificial
  helical interface sequence
QEKKRKISIFRGIQAYNEIENVLK

SEQ ID NO: 19859 - protein, 12 aa, Artificial
  helical interface sequence
RDDLKKLLETES

SEQ ID NO: 19860 - protein, 6 aa, Artificial
  helical interface sequence
CEDAMV

SEQ ID NO: 19861 - protein, 17 aa, Artificial
  helical interface sequence
DYAVRLREKQKLRRIYG

SEQ ID NO: 19862 - protein, 24 aa, Artificial
  helical interface sequence
GALSKDAYIRSFQQSWNEYAKRQG

SEQ ID NO: 19863 - protein, 19 aa, Artificial
  helical interface sequence
PANFKILSHCILVLLAVKF

SEQ ID NO: 19864 - protein, 21 aa, Artificial
  helical interface sequence
RDEIDQLQEEMALTLQSYIKG

SEQ ID NO: 19865 - protein, 6 aa, Artificial
  helical interface sequence
LRSKKT

SEQ ID NO: 19866 - protein, 19 aa, Artificial
  helical interface sequence
WEALLVEMLGLLHRIAMVQ

SEQ ID NO: 19867 - protein, 15 aa, Artificial
  helical interface sequence
LLALAQALERLSLLW

SEQ ID NO: 19868 - protein, 13 aa, Artificial
  helical interface sequence
EHVLTALANGLSL

SEQ ID NO: 19869 - protein, 14 aa, Artificial
  helical interface sequence
RMHESMKLFDSICN

SEQ ID NO: 19870 - protein, 16 aa, Artificial
  helical interface sequence
PHFMALLQTHDVVAHE

SEQ ID NO: 19871 - protein, 13 aa, Artificial
  helical interface sequence
PQKLQALQRVLQS

SEQ ID NO: 19872 - protein, 20 aa, Artificial
  helical interface sequence
KDFQNAFKIHNAITVHMNKA

SEQ ID NO: 19873 - protein, 20 aa, Artificial
  helical interface sequence
PLFNQILTLQQSIKQLKGQL

SEQ ID NO: 19874 - protein, 20 aa, Artificial
  helical interface sequence
KDFQNAFKIHNAITVHMNKA

SEQ ID NO: 19875 - protein, 19 aa, Artificial
  helical interface sequence
PENFRLLGNVLVVVLARHF

SEQ ID NO: 19876 - protein, 9 aa, Artificial
  helical interface sequence
RFDIKSMAG

SEQ ID NO: 19877 - protein, 9 aa, Artificial
  helical interface sequence
LEAQKRLRA

SEQ ID NO: 19878 - protein, 12 aa, Artificial
  helical interface sequence
AAQLRIQKDINE

SEQ ID NO: 19879 - protein, 15 aa, Artificial
  helical interface sequence
IENLVKRVADQMQQY

SEQ ID NO: 19880 - protein, 23 aa, Artificial
  helical interface sequence
VGDAQVLVRYMKAELELYRLQRR

SEQ ID NO: 19881 - protein, 23 aa, Artificial
  helical interface sequence
VGDAQVLVRYMKAELELYRLQRR

SEQ ID NO: 19882 - protein, 23 aa, Artificial
  helical interface sequence
VGDAQVLVRYMKAELELYRLQRR

SEQ ID NO: 19883 - protein, 8 aa, Artificial
  helical interface sequence
TDTQISRL

SEQ ID NO: 19884 - protein, 9 aa, Artificial
  helical interface sequence
FPDFVHAVK

SEQ ID NO: 19885 - protein, 13 aa, Artificial
  helical interface sequence
FHRRELWEAIEAG

SEQ ID NO: 19886 - protein, 9 aa, Artificial
  helical interface sequence
FPDFVHAVK

SEQ ID NO: 19887 - protein, 19 aa, Artificial
  helical interface sequence
AASRVSAGEEVFAALFKMV

SEQ ID NO: 19888 - protein, 18 aa, Artificial
  helical interface sequence
IPTLESMLDHLAGQHAVR

SEQ ID NO: 19889 - protein, 19 aa, Artificial
  helical interface sequence
AASRVSAGEEVFAALFKMV

SEQ ID NO: 19890 - protein, 15 aa, Artificial
  helical interface sequence
PLQRLKVKRQWAEAY

SEQ ID NO: 19891 - protein, 15 aa, Artificial
  helical interface sequence
DAAAAIVQAQWEDVW

SEQ ID NO: 19892 - protein, 16 aa, Artificial
  helical interface sequence
PDAWSRCFNRITTGMT

SEQ ID NO: 19893 - protein, 19 aa, Artificial
  helical interface sequence
AASRVSAGEEVFAALFKMV

SEQ ID NO: 19894 - protein, 5 aa, Artificial
  helical interface sequence
VHIGL

SEQ ID NO: 19895 - protein, 14 aa, Artificial
  helical interface sequence
GRVASQVAEQALDG

SEQ ID NO: 19896 - protein, 10 aa, Artificial
  helical interface sequence
PDEALLAVAH

SEQ ID NO: 19897 - protein, 9 aa, Artificial
  helical interface sequence
PQQIRQLCG

SEQ ID NO: 19898 - protein, 9 aa, Artificial
  helical interface sequence
IILGLYYIT

SEQ ID NO: 19899 - protein, 16 aa, Artificial
  helical interface sequence
YRLTVVVAKRAQQLLR

SEQ ID NO: 19900 - protein, 5 aa, Artificial
  helical interface sequence
DRQLR

SEQ ID NO: 19901 - protein, 5 aa, Artificial
  helical interface sequence
VSNLN

SEQ ID NO: 19902 - protein, 9 aa, Artificial
  helical interface sequence
RDSARSSVT

SEQ ID NO: 19903 - protein, 17 aa, Artificial
  helical interface sequence
YGATAGLQLAKNHVALH

SEQ ID NO: 19904 - protein, 7 aa, Artificial
  helical interface sequence
LLIEMLH

SEQ ID NO: 19905 - protein, 6 aa, Artificial
  helical interface sequence
SEELET

SEQ ID NO: 19906 - protein, 7 aa, Artificial
  helical interface sequence
IAELAAL

SEQ ID NO: 19907 - protein, 5 aa, Artificial
  helical interface sequence
LSYPD

SEQ ID NO: 19908 - protein, 14 aa, Artificial
  helical interface sequence
IVIKREMVSQYLHT

SEQ ID NO: 19909 - protein, 11 aa, Artificial
  helical interface sequence
LKKLKESYCQR

SEQ ID NO: 19910 - protein, 16 aa, Artificial
  helical interface sequence
LSLALYVFDEYLQKTV

SEQ ID NO: 19911 - protein, 13 aa, Artificial
  helical interface sequence
EALGEFIFDKKLL

SEQ ID NO: 19912 - protein, 16 aa, Artificial
  helical interface sequence
LSLALYVFDEYLQKTV

SEQ ID NO: 19913 - protein, 16 aa, Artificial
  helical interface sequence
LSLALYVFDEYLQKTV

SEQ ID NO: 19914 - protein, 16 aa, Artificial
  helical interface sequence
LSLALYVFDEYLQKTV

SEQ ID NO: 19915 - protein, 16 aa, Artificial
  helical interface sequence
LSLALYVFDEYLQKTV

SEQ ID NO: 19916 - protein, 16 aa, Artificial
  helical interface sequence
LSLALYVFDEYLQKTV

SEQ ID NO: 19917 - protein, 16 aa, Artificial
  helical interface sequence
LSLALYVFDEYLQKTV

SEQ ID NO: 19918 - protein, 13 aa, Artificial
  helical interface sequence
EALGEFIFDKKLL

SEQ ID NO: 19919 - protein, 16 aa, Artificial
  helical interface sequence
LSLALYVFDEYLQKTV

SEQ ID NO: 19920 - protein, 16 aa, Artificial
  helical interface sequence
LSLALYVFDEYLQKTV

SEQ ID NO: 19921 - protein, 16 aa, Artificial
  helical interface sequence
LSLALYVFDEYLQKTV

SEQ ID NO: 19922 - protein, 9 aa, Artificial
  helical interface sequence
LSGLNAFIE

SEQ ID NO: 19923 - protein, 21 aa, Artificial
  helical interface sequence
NADSRILIEKARVEAQSHRLT

SEQ ID NO: 19924 - protein, 22 aa, Artificial
  helical interface sequence
TADAEILINTARIHAQNYLKTY

SEQ ID NO: 19925 - protein, 5 aa, Artificial
  helical interface sequence
SLVFN

SEQ ID NO: 19926 - protein, 22 aa, Artificial
  helical interface sequence
AADTQAIADIVQYHLELYTSQY

SEQ ID NO: 19927 - protein, 18 aa, Artificial
  helical interface sequence
PEDLFETISQALLNAADR

SEQ ID NO: 19928 - protein, 21 aa, Artificial
  helical interface sequence
NADSRILIEKARVEAQSHRLT

SEQ ID NO: 19929 - protein, 15 aa, Artificial
  helical interface sequence
VAAASKILSNLVYQY

SEQ ID NO: 19930 - protein, 22 aa, Artificial
  helical interface sequence
AADGDALVKRFKNSVKWYHFDH

SEQ ID NO: 19931 - protein, 7 aa, Artificial
  helical interface sequence
FGAHMAN

SEQ ID NO: 19932 - protein, 14 aa, Artificial
  helical interface sequence
EEMEDRLQALEKDK

SEQ ID NO: 19933 - protein, 20 aa, Artificial
  helical interface sequence
KANKDLISAGLKEFSVLLNQ

SEQ ID NO: 19934 - protein, 6 aa, Artificial
  helical interface sequence
TREKYQ

SEQ ID NO: 19935 - protein, 10 aa, Artificial
  helical interface sequence
PRHLQLAVRN

SEQ ID NO: 19936 - protein, 29 aa, Artificial
  helical interface sequence
SKAMSIMNSFVNDVFERIAGEASRLAHYN

SEQ ID NO: 19937 - protein, 29 aa, Artificial
  helical interface sequence
SKAMSIMNSFVNDVFERIAGEASRLAHYN

SEQ ID NO: 19938 - protein, 5 aa, Artificial
  helical interface sequence
RSSRA

SEQ ID NO: 19939 - protein, 5 aa, Artificial
  helical interface sequence
RSSRA

SEQ ID NO: 19940 - protein, 29 aa, Artificial
  helical interface sequence
SSAVMALQEASEAYLVALFEDTNLCAIHA

SEQ ID NO: 19941 - protein, 29 aa, Artificial
  helical interface sequence
SKAMSIMNSFVNDVFERIAGEASRLAHYN

SEQ ID NO: 19942 - protein, 10 aa, Artificial
  helical interface sequence
PRHLQLAVRN

SEQ ID NO: 19943 - protein, 5 aa, Artificial
  helical interface sequence
ECVSK

SEQ ID NO: 19944 - protein, 10 aa, Artificial
  helical interface sequence
DDLKKKIKEN

SEQ ID NO: 19945 - protein, 6 aa, Artificial
  helical interface sequence
WVGRKN

SEQ ID NO: 19946 - protein, 17 aa, Artificial
  helical interface sequence
IFYAELARGIEDIASMY

SEQ ID NO: 19947 - protein, 6 aa, Artificial
  helical interface sequence
RAAVDA

SEQ ID NO: 19948 - protein, 13 aa, Artificial
  helical interface sequence
QCQETIRTALAMG

SEQ ID NO: 19949 - protein, 9 aa, Artificial
  helical interface sequence
QAVLSLYAS

SEQ ID NO: 19950 - protein, 6 aa, Artificial
  helical interface sequence
ERELLE

SEQ ID NO: 19951 - protein, 24 aa, Artificial
  helical interface sequence
TCGIADFLSTYQTKVDKDLQSLED

SEQ ID NO: 19952 - protein, 11 aa, Artificial
  helical interface sequence
LEEYNSLEETA

SEQ ID NO: 19953 - protein, 28 aa, Artificial
  helical interface sequence
MFPRMLMKLVSLRTLSSVHSEQVFALRL

SEQ ID NO: 19954 - protein, 16 aa, Artificial
  helical interface sequence
TGHALLHTLYQQNLKN

SEQ ID NO: 19955 - protein, 16 aa, Artificial
  helical interface sequence
LDWTDEFLMKVSEISG

SEQ ID NO: 19956 - protein, 14 aa, Artificial
  helical interface sequence
SYGKFIQRDTLHKG

SEQ ID NO: 19957 - protein, 5 aa, Artificial
  helical interface sequence
SEQLT

SEQ ID NO: 19958 - protein, 33 aa, Artificial
  helical interface sequence
IEEQAKTFLDKFNHEAEDLFYQSSLASWNYNTN

SEQ ID NO: 19959 - protein, 5 aa, Artificial
  helical interface sequence
ICVAY

SEQ ID NO: 19960 - protein, 5 aa, Artificial
  helical interface sequence
ICVAY

SEQ ID NO: 19961 - protein, 23 aa, Artificial
  helical interface sequence
WFGVIMIPTLLAATICFVIAFIA

SEQ ID NO: 19962 - protein, 23 aa, Artificial
  helical interface sequence
WFGVIMIPTLLAATICFVIAFIA

SEQ ID NO: 19963 - protein, 26 aa, Artificial
  helical interface sequence
LPKMFGIHLFLAGLLCFGFGAFHLTG

SEQ ID NO: 19964 - protein, 25 aa, Artificial
  helical interface sequence
GLIATALFVLVPSVFLIILYVQTES

SEQ ID NO: 19965 - protein, 25 aa, Artificial
  helical interface sequence
DPLVDVLPVIPVLFLALAFVWQAAV

SEQ ID NO: 19966 - protein, 6 aa, Artificial
  helical interface sequence
LNKIKN

SEQ ID NO: 19967 - protein, 17 aa, Artificial
  helical interface sequence
SMDSRLQRIHAEIKNSL

SEQ ID NO: 19968 - protein, 5 aa, Artificial
  helical interface sequence
PRTFG

SEQ ID NO: 19969 - protein, 6 aa, Artificial
  helical interface sequence
VEILFE

SEQ ID NO: 19970 - protein, 7 aa, Artificial
  helical interface sequence
KSIAKTL

SEQ ID NO: 19971 - protein, 10 aa, Artificial
  helical interface sequence
QLVKDRKFLR

SEQ ID NO: 19972 - protein, 15 aa, Artificial
  helical interface sequence
VRRAIKQAVQRVMES

SEQ ID NO: 19973 - protein, 16 aa, Artificial
  helical interface sequence
SRTACLNAASVALVDA

SEQ ID NO: 19974 - protein, 5 aa, Artificial
  helical interface sequence
VPRVI

SEQ ID NO: 19975 - protein, 16 aa, Artificial
  helical interface sequence
SRTACLNAASVALVDA

SEQ ID NO: 19976 - protein, 6 aa, Artificial
  helical interface sequence
DSLLEA

SEQ ID NO: 19977 - protein, 12 aa, Artificial
  helical interface sequence
AAELRHVMTNLG

SEQ ID NO: 19978 - protein, 10 aa, Artificial
  helical interface sequence
TKELGTVMRS

SEQ ID NO: 19979 - protein, 10 aa, Artificial
  helical interface sequence
FPEFLTMMAR

SEQ ID NO: 19980 - protein, 11 aa, Artificial
  helical interface sequence
FPEFLTMMARK

SEQ ID NO: 19981 - protein, 5 aa, Artificial
  helical interface sequence
LNESL

SEQ ID NO: 19982 - protein, 6 aa, Artificial
  helical interface sequence
LSLLAA

SEQ ID NO: 19983 - protein, 11 aa, Artificial
  helical interface sequence
KEGLQTVLKQF

SEQ ID NO: 19984 - protein, 5 aa, Artificial
  helical interface sequence
EWAYF

SEQ ID NO: 19985 - protein, 13 aa, Artificial
  helical interface sequence
IIKKESIVSLFEK

SEQ ID NO: 19986 - protein, 13 aa, Artificial
  helical interface sequence
IIKKESIVSLFEK

SEQ ID NO: 19987 - protein, 9 aa, Artificial
  helical interface sequence
VQGALDSLL

SEQ ID NO: 19988 - protein, 11 aa, Artificial
  helical interface sequence
YEHLSQVVNKN

SEQ ID NO: 19989 - protein, 10 aa, Artificial
  helical interface sequence
SVMDDRCLNG

SEQ ID NO: 19990 - protein, 13 aa, Artificial
  helical interface sequence
NDEINALQAIVAD

SEQ ID NO: 19991 - protein, 8 aa, Artificial
  helical interface sequence
EAEISHTQ

SEQ ID NO: 19992 - protein, 34 aa, Artificial
  helical interface sequence
MEWDREINNYTSLIHSLIEESQNQQEKNEQELLE

SEQ ID NO: 19993 - protein, 6 aa, Artificial
  helical interface sequence
LRPLLY

SEQ ID NO: 19994 - protein, 9 aa, Artificial
  helical interface sequence
ADALRRELA

SEQ ID NO: 19995 - protein, 7 aa, Artificial
  helical interface sequence
VKYLMKS

SEQ ID NO: 19996 - protein, 12 aa, Artificial
  helical interface sequence
TVAGFSLALDKY

SEQ ID NO: 19997 - protein, 16 aa, Artificial
  helical interface sequence
AVDAAVAVGYALAVTH

SEQ ID NO: 19998 - protein, 11 aa, Artificial
  helical interface sequence
PDTLKLLEAKG

SEQ ID NO: 19999 - protein, 16 aa, Artificial
  helical interface sequence
AVDAAVAVGYALAVTH

SEQ ID NO: 20000 - protein, 5 aa, Artificial
  helical interface sequence
AEDEA

SEQ ID NO: 20001 - protein, 10 aa, Artificial
  helical interface sequence
PNYRRRLVRW

SEQ ID NO: 20002 - protein, 7 aa, Artificial
  helical interface sequence
EAILKRV

SEQ ID NO: 20003 - protein, 15 aa, Artificial
  helical interface sequence
KEVKRRIFLGTFALS

SEQ ID NO: 20004 - protein, 13 aa, Artificial
  helical interface sequence
LEELYKMSRSEGF

SEQ ID NO: 20005 - protein, 9 aa, Artificial
  helical interface sequence
AAELRHVMT

SEQ ID NO: 20006 - protein, 9 aa, Artificial
  helical interface sequence
AAELRHVMT

SEQ ID NO: 20007 - protein, 9 aa, Artificial
  helical interface sequence
AAELRHVMT

SEQ ID NO: 20008 - protein, 18 aa, Artificial
  helical interface sequence
IPENNRLAIENIKDDIEN

SEQ ID NO: 20009 - protein, 12 aa, Artificial
  helical interface sequence
LDEIKRAFQLFD

SEQ ID NO: 20010 - protein, 13 aa, Artificial
  helical interface sequence
PQQLRRLFDAARN

SEQ ID NO: 20011 - protein, 8 aa, Artificial
  helical interface sequence
PCRIELYR

SEQ ID NO: 20012 - protein, 7 aa, Artificial
  helical interface sequence
VVESLAK

SEQ ID NO: 20013 - protein, 12 aa, Artificial
  helical interface sequence
AELVDALQFVCG

SEQ ID NO: 20014 - protein, 6 aa, Artificial
  helical interface sequence
LEDYVA

SEQ ID NO: 20015 - protein, 9 aa, Artificial
  helical interface sequence
AEERRRKQN

SEQ ID NO: 20016 - protein, 5 aa, Artificial
  helical interface sequence
QKDLW

SEQ ID NO: 20017 - protein, 8 aa, Artificial
  helical interface sequence
PRQVLAEF

SEQ ID NO: 20018 - protein, 5 aa, Artificial
  helical interface sequence
QKDLW

SEQ ID NO: 20019 - protein, 9 aa, Artificial
  helical interface sequence
AEERRRKQN

SEQ ID NO: 20020 - protein, 10 aa, Artificial
  helical interface sequence
PNYRRRLVRW

SEQ ID NO: 20021 - protein, 6 aa, Artificial
  helical interface sequence
LDSLII

SEQ ID NO: 20022 - protein, 10 aa, Artificial
  helical interface sequence
KLLGVLLMAS

SEQ ID NO: 20023 - protein, 29 aa, Artificial
  helical interface sequence
EEMLYAALLSFGLIFVGWGLGVLLLKIQG

SEQ ID NO: 20024 - protein, 24 aa, Artificial
  helical interface sequence
IDVLGWVALLVVFTWSIAMVVWGR

SEQ ID NO: 20025 - protein, 5 aa, Artificial
  helical interface sequence
QMTAF

SEQ ID NO: 20026 - protein, 17 aa, Artificial
  helical interface sequence
DAERYGYALENLQSVHG

SEQ ID NO: 20027 - protein, 7 aa, Artificial
  helical interface sequence
DSCFQEN

SEQ ID NO: 20028 - protein, 20 aa, Artificial
  helical interface sequence
NYSIIDKLVNIVDDLVECVK

SEQ ID NO: 20029 - protein, 26 aa, Artificial
  helical interface sequence
PRDKLVCILNCCKVINNLLLNASIAS

SEQ ID NO: 20030 - protein, 26 aa, Artificial
  helical interface sequence
PRDKLVCILNCCKVINNLLLNASIAS

SEQ ID NO: 20031 - protein, 8 aa, Artificial
  helical interface sequence
DLKVSIHQ

SEQ ID NO: 20032 - protein, 8 aa, Artificial
  helical interface sequence
LTKLLLNH

SEQ ID NO: 20033 - protein, 15 aa, Artificial
  helical interface sequence
NADISQSLLQTFIGR

SEQ ID NO: 20034 - protein, 7 aa, Artificial
  helical interface sequence
LTDLALT

SEQ ID NO: 20035 - protein, 5 aa, Artificial
  helical interface sequence
SEQLT

SEQ ID NO: 20036 - protein, 12 aa, Artificial
  helical interface sequence
KELIEIISGAAA

SEQ ID NO: 20037 - protein, 6 aa, Artificial
  helical interface sequence
CEDIAR

SEQ ID NO: 20038 - protein, 10 aa, Artificial
  helical interface sequence
PAARNILEKH

SEQ ID NO: 20039 - protein, 26 aa, Artificial
  helical interface sequence
LDTFVKQGRELARQQFLVRWHIQRIT

SEQ ID NO: 20040 - protein, 11 aa, Artificial
  helical interface sequence
TVALREIRRYQ

SEQ ID NO: 20041 - protein, 11 aa, Artificial
  helical interface sequence
TVALREIRRYQ

SEQ ID NO: 20042 - protein, 7 aa, Artificial
  helical interface sequence
AHDIKQL

SEQ ID NO: 20043 - protein, 7 aa, Artificial
  helical interface sequence
AEFLLEH

SEQ ID NO: 20044 - protein, 6 aa, Artificial
  helical interface sequence
PRVIEQ

SEQ ID NO: 20045 - protein, 30 aa, Artificial; identical to SEQ ID NO: 5978
  helical interface sequence

SEQ ID NO: 20046 - protein, 5 aa, Artificial
  helical interface sequence
EKMEK

SEQ ID NO: 20047 - protein, 7 aa, Artificial
  helical interface sequence
DEQLKSG

SEQ ID NO: 20048 - protein, 7 aa, Artificial
  helical interface sequence
DEQLKSG

SEQ ID NO: 20049 - protein, 6 aa, Artificial
  helical interface sequence
DEQLKS

SEQ ID NO: 20050 - protein, 8 aa, Artificial
  helical interface sequence
FMDVYQRS

SEQ ID NO: 20051 - protein, 9 aa, Artificial
  helical interface sequence
TWFPAYWQG

SEQ ID NO: 20052 - protein, 6 aa, Artificial
  helical interface sequence
SEELQA

SEQ ID NO: 20053 - protein, 14 aa, Artificial
  helical interface sequence
TERHRAEVRRAVND

SEQ ID NO: 20054 - protein, 11 aa, Artificial
  helical interface sequence
HAVEEALHEAI

SEQ ID NO: 20055 - protein, 11 aa, Artificial
  helical interface sequence
HAVEEALHEAI

SEQ ID NO: 20056 - protein, 11 aa, Artificial
  helical interface sequence
HAVEEALHEAI

SEQ ID NO: 20057 - protein, 11 aa, Artificial
  helical interface sequence
HAVEEALHEAI

SEQ ID NO: 20058 - protein, 32 aa, Artificial
  helical interface sequence
TLGRTAARGIQCLTAAQEVEVWLDKLEANVKA

SEQ ID NO: 20059 - protein, 11 aa, Artificial
  helical interface sequence
HAVEEALHEAI

SEQ ID NO: 20060 - protein, 11 aa, Artificial
  helical interface sequence
HAVEEALHEAI

SEQ ID NO: 20061 - protein, 10 aa, Artificial
  helical interface sequence
YLQNITYTPR

SEQ ID NO: 20062 - protein, 5 aa, Artificial
  helical interface sequence
PAEFR

SEQ ID NO: 20063 - protein, 13 aa, Artificial
  helical interface sequence
PEALIYAVMQLQK

SEQ ID NO: 20064 - protein, 16 aa, Artificial
  helical interface sequence
EKDVENLEALLPLIEG

SEQ ID NO: 20065 - protein, 6 aa, Artificial
  helical interface sequence
LCAAAC

SEQ ID NO: 20066 - protein, 22 aa, Artificial
  helical interface sequence
PMFKIYFWLLAADFVILTWVGA

SEQ ID NO: 20067 - protein, 22 aa, Artificial
  helical interface sequence
PMFKIYFWLLAADFVILTWVGA

SEQ ID NO: 20068 - protein, 29 aa, Artificial
  helical interface sequence
GFMLRYLHANGASLFFIAVYLHIFRGLYY

SEQ ID NO: 20069 - protein, 22 aa, Artificial
  helical interface sequence
PMFKIYFWLLAADFVILTWVGA

SEQ ID NO: 20070 - protein, 29 aa, Artificial
  helical interface sequence
GFMLRYLHANGASLFFIAVYLHIFRGLYY

SEQ ID NO: 20071 - protein, 5 aa, Artificial
  helical interface sequence
ISQLF

SEQ ID NO: 20072 - protein, 23 aa, Artificial
  helical interface sequence
YATAGAGAVATGAAVWPLINQMN

SEQ ID NO: 20073 - protein, 18 aa, Artificial
  helical interface sequence
MAERNQQIAGIGAALIEH

SEQ ID NO: 20074 - protein, 12 aa, Artificial
  helical interface sequence
IPTWHQIEIDIP

SEQ ID NO: 20075 - protein, 29 aa, Artificial
  helical interface sequence
IDDLEDELYAQKLKYKAISEELDHALKDM

SEQ ID NO: 20076 - protein, 8 aa, Artificial
  helical interface sequence
AAALSQIG

SEQ ID NO: 20077 - protein, 7 aa, Artificial
  helical interface sequence
SEQLTSG

SEQ ID NO: 20078 - protein, 12 aa, Artificial
  helical interface sequence
LCLKFAMLCTLN

SEQ ID NO: 20079 - protein, 13 aa, Artificial
  helical interface sequence
KREKEVLARAEKL

SEQ ID NO: 20080 - protein, 9 aa, Artificial
  helical interface sequence
LKYYGFTLS

SEQ ID NO: 20081 - protein, 6 aa, Artificial
  helical interface sequence
PKDTLM

SEQ ID NO: 20082 - protein, 15 aa, Artificial
  helical interface sequence
SVLDEAFQRYRDLLF

SEQ ID NO: 20083 - protein, 10 aa, Artificial
  helical interface sequence
QESKLIILAS

SEQ ID NO: 20084 - protein, 17 aa, Artificial
  helical interface sequence
EKLLWTTSRVLKVLSVC

SEQ ID NO: 20085 - protein, 17 aa, Artificial
  helical interface sequence
QVVVNKAAVMVHQLSKK

SEQ ID NO: 20086 - protein, 16 aa, Artificial
  helical interface sequence
VLEGLKVKSEWGRAYG

SEQ ID NO: 20087 - protein, 16 aa, Artificial
  helical interface sequence
LVLQSHLGHLADQHIQ

SEQ ID NO: 20088 - protein, 16 aa, Artificial
  helical interface sequence
PATLKEELDHLQVQHE

SEQ ID NO: 20089 - protein, 15 aa, Artificial
  helical interface sequence
EEDHRIVQKQWDILW

SEQ ID NO: 20090 - protein, 15 aa, Artificial
  helical interface sequence
KKKLKEVHRKIMLAN

SEQ ID NO: 20091 - protein, 15 aa, Artificial
  helical interface sequence
KKKLKEVHRKIMLAN

SEQ ID NO: 20092 - protein, 15 aa, Artificial
  helical interface sequence
KKKLKEVHRKIMLAN

SEQ ID NO: 20093 - protein, 8 aa, Artificial
  helical interface sequence
ENEFIAIC

SEQ ID NO: 20094 - protein, 7 aa, Artificial
  helical interface sequence
MQDYQDS

SEQ ID NO: 20095 - protein, 15 aa, Artificial
  helical interface sequence
FRRAMKRAVQNAMRL

SEQ ID NO: 20096 - protein, 7 aa, Artificial
  helical interface sequence
RKLQELG

SEQ ID NO: 20097 - protein, 14 aa, Artificial
  helical interface sequence
LSVYQKMKFNVAMG

SEQ ID NO: 20098 - protein, 9 aa, Artificial
  helical interface sequence
TNVISEPLR

SEQ ID NO: 20099 - protein, 6 aa, Artificial
  helical interface sequence
EQLERE

SEQ ID NO: 20100 - protein, 26 aa, Artificial
  helical interface sequence
FSDIGSLVRAHKHLETLLEVLVTLSQ

SEQ ID NO: 20101 - protein, 7 aa, Artificial
  helical interface sequence
RELAHKG

SEQ ID NO: 20102 - protein, 18 aa, Artificial
  helical interface sequence
PYAAQLAALDAAKKAMAY

SEQ ID NO: 20103 - protein, 8 aa, Artificial
  helical interface sequence
INQLVRKG

SEQ ID NO: 20104 - protein, 9 aa, Artificial
  helical interface sequence
YRGLRHRRG

SEQ ID NO: 20105 - protein, 14 aa, Artificial
  helical interface sequence
SDGFKSAISEVSTV

SEQ ID NO: 20106 - protein, 10 aa, Artificial
  helical interface sequence
ESVLNVIAAD

SEQ ID NO: 20107 - protein, 12 aa, Artificial
  helical interface sequence
LATDMGLLQERI

SEQ ID NO: 20108 - protein, 20 aa, Artificial
  helical interface sequence
QEHYDVASKVQETLQTYKSL

SEQ ID NO: 20109 - protein, 12 aa, Artificial
  helical interface sequence
LATDMGLLQERI

SEQ ID NO: 20110 - protein, 7 aa, Artificial
  helical interface sequence
QDIIAIL

SEQ ID NO: 20111 - protein, 7 aa, Artificial
  helical interface sequence
AELFYKG

SEQ ID NO: 20112 - protein, 8 aa, Artificial
  helical interface sequence
YIPTNVIS

SEQ ID NO: 20113 - protein, 20 aa, Artificial
  helical interface sequence
QEHYDVASKVQETLQTYKSL

SEQ ID NO: 20114 - protein, 16 aa, Artificial
  helical interface sequence
IFRFTQAGSEVSALLG

SEQ ID NO: 20115 - protein, 8 aa, Artificial
  helical interface sequence
QDIIAILG

SEQ ID NO: 20116 - protein, 8 aa, Artificial
  helical interface sequence
ERELLESY

SEQ ID NO: 20117 - protein, 16 aa, Artificial
  helical interface sequence
QKNVRAQLVDMKRLEV

SEQ ID NO: 20118 - protein, 30 aa, Artificial; identical to SEQ ID NO: 5122
  helical interface sequence

SEQ ID NO: 20119 - protein, 12 aa, Artificial
  helical interface sequence
RLEVDIDIKIRS

SEQ ID NO: 20120 - protein, 13 aa, Artificial
  helical interface sequence
LRVLRSILENLRS

SEQ ID NO: 20121 - protein, 15 aa, Artificial
  helical interface sequence
DKYQFALASLQNLLY

SEQ ID NO: 20122 - protein, 11 aa, Artificial
  helical interface sequence
LDQLNLVLRDN

SEQ ID NO: 20123 - protein, 33 aa, Artificial; identical to SEQ ID NO: 2859
  helical interface sequence

SEQ ID NO: 20124 - protein, 7 aa, Artificial
  helical interface sequence
RDSLEAR

SEQ ID NO: 20125 - protein, 6 aa, Artificial
  helical interface sequence
DGIYAA

SEQ ID NO: 20126 - protein, 11 aa, Artificial
  helical interface sequence
SARVSELMNES

SEQ ID NO: 20127 - protein, 11 aa, Artificial
  helical interface sequence
SARVSELMNES

SEQ ID NO: 20128 - protein, 10 aa, Artificial
  helical interface sequence
PGRVFDMIRR

SEQ ID NO: 20129 - protein, 8 aa, Artificial
  helical interface sequence
VSSLMNGL

SEQ ID NO: 20130 - protein, 8 aa, Artificial
  helical interface sequence
VSSLMNGL

SEQ ID NO: 20131 - protein, 9 aa, Artificial
  helical interface sequence
STYAHYLFN

SEQ ID NO: 20132 - protein, 9 aa, Artificial
  helical interface sequence
STYAHYLFN

SEQ ID NO: 20133 - protein, 11 aa, Artificial
  helical interface sequence
ISAYDDELAFY

SEQ ID NO: 20134 - protein, 12 aa, Artificial
  helical interface sequence
CAQANTAMFIGG

SEQ ID NO: 20135 - protein, 14 aa, Artificial
  helical interface sequence
DIGKNIVTALLRAN

SEQ ID NO: 20136 - protein, 21 aa, Artificial
  helical interface sequence
LPNVMMSADAMLEGIEYCKEN

SEQ ID NO: 20137 - protein, 23 aa, Artificial
  helical interface sequence
PIDLIDDALMVGMGVVIRLYDEG

SEQ ID NO: 20138 - protein, 22 aa, Artificial
  helical interface sequence
KEKLIKEYERITTDVMERMVQV

SEQ ID NO: 20139 - protein, 8 aa, Artificial
  helical interface sequence
EASLKKVL

SEQ ID NO: 20140 - protein, 10 aa, Artificial
  helical interface sequence
RPDAEYWNSQ

SEQ ID NO: 20141 - protein, 21 aa, Artificial
  helical interface sequence
QGALANIAVDKANLEIMTKRS

SEQ ID NO: 20142 - protein, 9 aa, Artificial
  helical interface sequence
KDLLEQRRA

SEQ ID NO: 20143 - protein, 5 aa, Artificial
  helical interface sequence
FRKSN

SEQ ID NO: 20144 - protein, 15 aa, Artificial
  helical interface sequence
IELAFSSVEHIMRDV

SEQ ID NO: 20145 - protein, 27 aa, Artificial
  helical interface sequence
VGTIFAGAFVFQTVFDTAITSWYENHN

SEQ ID NO: 20146 - protein, 7 aa, Artificial
  helical interface sequence
KGVFVLN

SEQ ID NO: 20147 - protein, 5 aa, Artificial
  helical interface sequence
KYELD

SEQ ID NO: 20148 - protein, 11 aa, Artificial
  helical interface sequence
QSKIWDVVEKA

SEQ ID NO: 20149 - protein, 28 aa, Artificial
  helical interface sequence
EETKEVLKLFKLKVNQFYRHAFGIVNDY

SEQ ID NO: 20150 - protein, 5 aa, Artificial
  helical interface sequence
PIFHR

SEQ ID NO: 20151 - protein, 7 aa, Artificial
  helical interface sequence
QDVASEC

SEQ ID NO: 20152 - protein, 16 aa, Artificial
  helical interface sequence
ISTLDFEIRHQLTQIH

SEQ ID NO: 20153 - protein, 22 aa, Artificial
  helical interface sequence
PDTFDKYYRPRYEYLAKEAAAG

SEQ ID NO: 20154 - protein, 7 aa, Artificial
  helical interface sequence
PEKYIQA

SEQ ID NO: 20155 - protein, 6 aa, Artificial
  helical interface sequence
PEKYIQ

SEQ ID NO: 20156 - protein, 8 aa, Artificial
  helical interface sequence
GHIARRFG

SEQ ID NO: 20157 - protein, 9 aa, Artificial
  helical interface sequence
FYPKLKSGG

SEQ ID NO: 20158 - protein, 8 aa, Artificial
  helical interface sequence
QSKYLMMY

SEQ ID NO: 20159 - protein, 11 aa, Artificial
  helical interface sequence
AEQAKIAEEAG

SEQ ID NO: 20160 - protein, 14 aa, Artificial
  helical interface sequence
EEQIAEFKEAFSLF

SEQ ID NO: 20161 - protein, 8 aa, Artificial
  helical interface sequence
RKDIQTLN

SEQ ID NO: 20162 - protein, 15 aa, Artificial
  helical interface sequence
ESVLNVIAADVTLVG

SEQ ID NO: 20163 - protein, 15 aa, Artificial
  helical interface sequence
KSVMEELKRIIDDSE

SEQ ID NO: 20164 - protein, 15 aa, Artificial
  helical interface sequence
KSVMEELKRIIDDSE

SEQ ID NO: 20165 - protein, 16 aa, Artificial
  helical interface sequence
EEWKFDTLCDLYDTLT

SEQ ID NO: 20166 - protein, 14 aa, Artificial
  helical interface sequence
LHRVAAHELGHSLG

SEQ ID NO: 20167 - protein, 10 aa, Artificial
  helical interface sequence
GQYAYRDRRQ

SEQ ID NO: 20168 - protein, 27 aa, Artificial
  helical interface sequence
VSELQARLADMGQGVGASLLDVLVMRE

SEQ ID NO: 20169 - protein, 7 aa, Artificial
  helical interface sequence
RPLWRHY

SEQ ID NO: 20170 - protein, 7 aa, Artificial
  helical interface sequence
RPLWRHY

SEQ ID NO: 20171 - protein, 10 aa, Artificial
  helical interface sequence
QRLKRLVNEG

SEQ ID NO: 20172 - protein, 15 aa, Artificial
  helical interface sequence
LMERAWEIARTLAKQ

SEQ ID NO: 20173 - protein, 9 aa, Artificial
  helical interface sequence
NPVGVTHKL

SEQ ID NO: 20174 - protein, 15 aa, Artificial
  helical interface sequence
METKEVVNANCKACH

SEQ ID NO: 20175 - protein, 5 aa, Artificial
  helical interface sequence
RPFCT

SEQ ID NO: 20176 - protein, 9 aa, Artificial
  helical interface sequence
NPVGVTHKL

SEQ ID NO: 20177 - protein, 5 aa, Artificial
  helical interface sequence
RPFCT

SEQ ID NO: 20178 - protein, 15 aa, Artificial
  helical interface sequence
NLRRGAVLGYIGATV

SEQ ID NO: 20179 - protein, 5 aa, Artificial
  helical interface sequence
WPEWW

SEQ ID NO: 20180 - protein, 15 aa, Artificial
  helical interface sequence
IWPHIDWLTAFSIRY

SEQ ID NO: 20181 - protein, 17 aa, Artificial
  helical interface sequence
LREEDKVSAYYAGGLLY

SEQ ID NO: 20182 - protein, 15 aa, Artificial
  helical interface sequence
TDVLADACWALSYLS

SEQ ID NO: 20183 - protein, 8 aa, Artificial
  helical interface sequence
IIKKESIV

SEQ ID NO: 20184 - protein, 24 aa, Artificial
  helical interface sequence
LHDQVHLLECAWLEILMIGLVWRS

SEQ ID NO: 20185 - protein, 17 aa, Artificial
  helical interface sequence
LQLVGVTAMFIASKYEE

SEQ ID NO: 20186 - protein, 15 aa, Artificial
  helical interface sequence
IWTHLDWVSNTGYTY

SEQ ID NO: 20187 - protein, 5 aa, Artificial
  helical interface sequence
EVFTG

SEQ ID NO: 20188 - protein, 15 aa, Artificial
  helical interface sequence
IFRFTQAGSEVSALL

SEQ ID NO: 20189 - protein, 12 aa, Artificial
  helical interface sequence
LATDMGTMQERI

SEQ ID NO: 20190 - protein, 38 aa, Artificial; identical to SEQ ID NO: 10974
  helical interface sequence

SEQ ID NO: 20191 - protein, 18 aa, Artificial
  helical interface sequence
LKARQERRLAEINREFLC

SEQ ID NO: 20192 - protein, 9 aa, Artificial
  helical interface sequence
PVTAKEVVL

SEQ ID NO: 20193 - protein, 16 aa, Artificial
  helical interface sequence
TNLRYLALESMCTLAS

SEQ ID NO: 20194 - protein, 16 aa, Artificial
  helical interface sequence
GYSKKKYVCKLLFIFL

SEQ ID NO: 20195 - protein, 11 aa, Artificial
  helical interface sequence
QTKVLKQLLML

SEQ ID NO: 20196 - protein, 16 aa, Artificial
  helical interface sequence
PDLRDRGYIYWRLLST

SEQ ID NO: 20197 - protein, 9 aa, Artificial
  helical interface sequence
PVTAKEVVL

SEQ ID NO: 20198 - protein, 17 aa, Artificial
  helical interface sequence
VELQQRAVEYLRLSTVA

SEQ ID NO: 20199 - protein, 15 aa, Artificial
  helical interface sequence
PTFMGLALHCIANVG

SEQ ID NO: 20200 - protein, 16 aa, Artificial
  helical interface sequence
GYSKKKYVCKLLFIFL

SEQ ID NO: 20201 - protein, 5 aa, Artificial
  helical interface sequence
YEDCI

SEQ ID NO: 20202 - protein, 12 aa, Artificial
  helical interface sequence
KWIQEYLEKCLN

SEQ ID NO: 20203 - protein, 26 aa, Artificial
  helical interface sequence
DKAKESIRAKCVQYLDRAEKLKDYLR

SEQ ID NO: 20204 - protein, 13 aa, Artificial
  helical interface sequence
SGTKAFMEALQAG

SEQ ID NO: 20205 - protein, 9 aa, Artificial
  helical interface sequence
CALMEQVAH

SEQ ID NO: 20206 - protein, 9 aa, Artificial
  helical interface sequence
TKDLLKKFQ

SEQ ID NO: 20207 - protein, 26 aa, Artificial
  helical interface sequence
PELIRTIMGWTLDFLRERLLGWIQDQ

SEQ ID NO: 20208 - protein, 18 aa, Artificial
  helical interface sequence
DAEKDYLYDVLRMYHQTM

SEQ ID NO: 20209 - protein, 13 aa, Artificial
  helical interface sequence
NTNLAVVFGPNLL

SEQ ID NO: 20210 - protein, 32 aa, Artificial
  helical interface sequence
LERVLEAAAQAARDVHTLLDRVVRQHVREASI

SEQ ID NO: 20211 - protein, 16 aa, Artificial
  helical interface sequence
YEKKKLQRQIDLVLKY

SEQ ID NO: 20212 - protein, 11 aa, Artificial
  helical interface sequence
AMDVVYALKRQ

SEQ ID NO: 20213 - protein, 7 aa, Artificial
  helical interface sequence
EELNKLL

SEQ ID NO: 20214 - protein, 38 aa, Artificial
  helical interface sequence
VGQAVLESYSRILESLAYTVMSRIEDVLYTDTLALKQT

SEQ ID NO: 20215 - protein, 14 aa, Artificial
  helical interface sequence
GTLTYEAVKQTTDY

SEQ ID NO: 20216 - protein, 11 aa, Artificial
  helical interface sequence
STTMRRLIDTY

SEQ ID NO: 20217 - protein, 11 aa, Artificial
  helical interface sequence
AEQAKIAEEAG

SEQ ID NO: 20218 - protein, 11 aa, Artificial
  helical interface sequence
STTMRRLIDTY

SEQ ID NO: 20219 - protein, 8 aa, Artificial
  helical interface sequence
YKLIAELS

SEQ ID NO: 20220 - protein, 13 aa, Artificial
  helical interface sequence
LCVEWLRRYLENG

SEQ ID NO: 20221 - protein, 7 aa, Artificial
  helical interface sequence
LEQLEAQ

SEQ ID NO: 20222 - protein, 6 aa, Artificial
  helical interface sequence
NLCAMG

SEQ ID NO: 20223 - protein, 22 aa, Artificial
  helical interface sequence
SHCWLRDMVIQLSLSLTTLLDK

SEQ ID NO: 20224 - protein, 21 aa, Artificial
  helical interface sequence
LPHMADMSTYMFKGIISFAKV

SEQ ID NO: 20225 - protein, 9 aa, Artificial
  helical interface sequence
EQEFLRIMK

SEQ ID NO: 20226 - protein, 17 aa, Artificial
  helical interface sequence
RRLYEKKIFEYETQRRR

SEQ ID NO: 20227 - protein, 5 aa, Artificial
  helical interface sequence
EKTFG

SEQ ID NO: 20228 - protein, 16 aa, Artificial
  helical interface sequence
VQSQVVEAFIRWRQRF

SEQ ID NO: 20229 - protein, 5 aa, Artificial
  helical interface sequence
IVEQC

SEQ ID NO: 20230 - protein, 18 aa, Artificial
  helical interface sequence
NQHLCGSHLVEALYLVCG

SEQ ID NO: 20231 - protein, 7 aa, Artificial
  helical interface sequence
LYQLENY

SEQ ID NO: 20232 - protein, 7 aa, Artificial
  helical interface sequence
LYQLENY

SEQ ID NO: 20233 - protein, 5 aa, Artificial
  helical interface sequence
FSSLG

SEQ ID NO: 20234 - protein, 18 aa, Artificial
  helical interface sequence
PEVRQSSFALLGDLTKAC

SEQ ID NO: 20235 - protein, 19 aa, Artificial
  helical interface sequence
HKNLLILYDAIGTLADSVG

SEQ ID NO: 20236 - protein, 11 aa, Artificial
  helical interface sequence
YHQRLRLLKSG

SEQ ID NO: 20237 - protein, 5 aa, Artificial
  helical interface sequence
PQRAV

SEQ ID NO: 20238 - protein, 5 aa, Artificial
  helical interface sequence
DDFAF

SEQ ID NO: 20239 - protein, 18 aa, Artificial
  helical interface sequence
PWKSAYIRQHRIDTNWRR

SEQ ID NO: 20240 - protein, 12 aa, Artificial
  helical interface sequence
RKDIEEHLQRVG

SEQ ID NO: 20241 - protein, 10 aa, Artificial
  helical interface sequence
ANEATKTLNR

SEQ ID NO: 20242 - protein, 18 aa, Artificial
  helical interface sequence
RILESKYVASWQDYHSEF

SEQ ID NO: 20243 - protein, 15 aa, Artificial
  helical interface sequence
GDVDHSTLVTLFKLL

SEQ ID NO: 20244 - protein, 8 aa, Artificial
  helical interface sequence
PLHLAAYD

SEQ ID NO: 20245 - protein, 8 aa, Artificial
  helical interface sequence
PLHLAAYD

SEQ ID NO: 20246 - protein, 9 aa, Artificial
  helical interface sequence
PLHLAAKTG

SEQ ID NO: 20247 - protein, 8 aa, Artificial
  helical interface sequence
PLHLAADN

SEQ ID NO: 20248 - protein, 8 aa, Artificial
  helical interface sequence
VETVRSIT

SEQ ID NO: 20249 - protein, 32 aa, Artificial; identical to SEQ ID NO: 1420
  helical interface sequence

SEQ ID NO: 20250 - protein, 12 aa, Artificial
  helical interface sequence
GGDVLQWITQRL

SEQ ID NO: 20251 - protein, 5 aa, Artificial
  helical interface sequence
LHQVA

SEQ ID NO: 20252 - protein, 7 aa, Artificial
  helical interface sequence
SEQLTSG

SEQ ID NO: 20253 - protein, 6 aa, Artificial
  helical interface sequence
SEQLTS

SEQ ID NO: 20254 - protein, 10 aa, Artificial
  helical interface sequence
WRVRYMVADK

SEQ ID NO: 20255 - protein, 10 aa, Artificial
  helical interface sequence
REESLQLMDL

SEQ ID NO: 20256 - protein, 7 aa, Artificial
  helical interface sequence
ISQLLSA

SEQ ID NO: 20257 - protein, 14 aa, Artificial
  helical interface sequence
LGLYNEAVKIIHDF

SEQ ID NO: 20258 - protein, 6 aa, Artificial
  helical interface sequence
ASLVEK

SEQ ID NO: 20259 - protein, 9 aa, Artificial
  helical interface sequence
NAHYAKVGG

SEQ ID NO: 20260 - protein, 13 aa, Artificial
  helical interface sequence
IRHILLIADVMTR

SEQ ID NO: 20261 - protein, 9 aa, Artificial
  helical interface sequence
VKHIYEFLK

SEQ ID NO: 20262 - protein, 5 aa, Artificial
  helical interface sequence
RLLDN

SEQ ID NO: 20263 - protein, 15 aa, Artificial
  helical interface sequence
YSMAKRYVDTLFEHE

SEQ ID NO: 20264 - protein, 23 aa, Artificial
  helical interface sequence
LNDQVTLLKYGVHEIIYTMLASL

SEQ ID NO: 20265 - protein, 12 aa, Artificial
  helical interface sequence
PREMLCLVWASK

SEQ ID NO: 20266 - protein, 33 aa, Artificial; identical to SEQ ID NO: 3045
  helical interface sequence

SEQ ID NO: 20267 - protein, 9 aa, Artificial
  helical interface sequence
YCRHNYGVG

SEQ ID NO: 20268 - protein, 10 aa, Artificial
  helical interface sequence
ELTLCSRHAG

SEQ ID NO: 20269 - protein, 5 aa, Artificial
  helical interface sequence
SEQLT

SEQ ID NO: 20270 - protein, 25 aa, Artificial
  helical interface sequence
RDSYRRILMGSTLRKRKMYEEFLSK

SEQ ID NO: 20271 - protein, 5 aa, Artificial
  helical interface sequence
PAWQP

SEQ ID NO: 20272 - protein, 11 aa, Artificial
  helical interface sequence
EELISQAQVVL

SEQ ID NO: 20273 - protein, 20 aa, Artificial
  helical interface sequence
TLARQQQRQNIRWLLSLSVL

SEQ ID NO: 20274 - protein, 5 aa, Artificial
  helical interface sequence
EQVLA

SEQ ID NO: 20275 - protein, 19 aa, Artificial
  helical interface sequence
VQDICFAFLQNYYERMRTD

SEQ ID NO: 20276 - protein, 9 aa, Artificial
  helical interface sequence
FLPFYAILR

SEQ ID NO: 20277 - protein, 29 aa, Artificial
  helical interface sequence
RRDFLYYATAGAGAVATGAAVWPLINQMN

SEQ ID NO: 20278 - protein, 22 aa, Artificial
  helical interface sequence
PMFKIYFWLLAADFVILTWVGA

SEQ ID NO: 20279 - protein, 28 aa, Artificial
  helical interface sequence
RRDFLYYATAGAGAVATGAAVWPLINQM

SEQ ID NO: 20280 - protein, 32 aa, Artificial; identical to SEQ ID NO: 462
  helical interface sequence

SEQ ID NO: 20281 - protein, 18 aa, Artificial
  helical interface sequence
AKFFGVLAMFGAILVMAL

SEQ ID NO: 20282 - protein, 28 aa, Artificial
  helical interface sequence
RRDFLYYATAGAGAVATGAAVWPLINQM

SEQ ID NO: 20283 - protein, 18 aa, Artificial
  helical interface sequence
AKFFGVLAMFGAILVMAL

SEQ ID NO: 20284 - protein, 11 aa, Artificial
  helical interface sequence
QSKIWDVVEKA

SEQ ID NO: 20285 - protein, 18 aa, Artificial
  helical interface sequence
NDLQSLLCATLQNVLRKV

SEQ ID NO: 20286 - protein, 19 aa, Artificial
  helical interface sequence
RSVKPQILSVFGDIALAIG

SEQ ID NO: 20287 - protein, 18 aa, Artificial
  helical interface sequence
GDLRREISMSIKRLMDLG

SEQ ID NO: 20288 - protein, 8 aa, Artificial
  helical interface sequence
PEMVAAKR

SEQ ID NO: 20289 - protein, 16 aa, Artificial
  helical interface sequence
LRREISMSIKRLMDLG

SEQ ID NO: 20290 - protein, 5 aa, Artificial
  helical interface sequence
TVSAL

SEQ ID NO: 20291 - protein, 15 aa, Artificial
  helical interface sequence
KPDQGRAVSTCAHLF

SEQ ID NO: 20292 - protein, 19 aa, Artificial
  helical interface sequence
PTNFKILAHNLIVVIAAYF

SEQ ID NO: 20293 - protein, 19 aa, Artificial
  helical interface sequence
PTNFKILAHNLIVVIAAYF

SEQ ID NO: 20294 - protein, 13 aa, Artificial
  helical interface sequence
EALLKNLQMVHQN

SEQ ID NO: 20295 - protein, 13 aa, Artificial
  helical interface sequence
EQELEDYIRHVLN

SEQ ID NO: 20296 - protein, 11 aa, Artificial
  helical interface sequence
VSYLSELADAV

SEQ ID NO: 20297 - protein, 10 aa, Artificial
  helical interface sequence
KELAKEFLEN

SEQ ID NO: 20298 - protein, 7 aa, Artificial
  helical interface sequence
RQALSDI

SEQ ID NO: 20299 - protein, 13 aa, Artificial
  helical interface sequence
PWQAFRLVLLPLS

SEQ ID NO: 20300 - protein, 16 aa, Artificial
  helical interface sequence
GGEYGAEAVERMFLGF

SEQ ID NO: 20301 - protein, 9 aa, Artificial
  helical interface sequence
SIKPDLIQL

SEQ ID NO: 20302 - protein, 6 aa, Artificial
  helical interface sequence
RFLQER

SEQ ID NO: 20303 - protein, 17 aa, Artificial
  helical interface sequence
LSQERTARLNELQRALV

SEQ ID NO: 20304 - protein, 16 aa, Artificial
  helical interface sequence
SQERTARLNELQRALV

SEQ ID NO: 20305 - protein, 16 aa, Artificial
  helical interface sequence
DRQHKTRTLKETLEGA

SEQ ID NO: 20306 - protein, 6 aa, Artificial
  helical interface sequence
QQLAEE

SEQ ID NO: 20307 - protein, 16 aa, Artificial
  helical interface sequence
MSDLKGTLELVAKKLF

SEQ ID NO: 20308 - protein, 19 aa, Artificial
  helical interface sequence
PAVHASLDKFLANVSTVLT

SEQ ID NO: 20309 - protein, 19 aa, Artificial
  helical interface sequence
PENFKLLGNVLVVVLARHH

SEQ ID NO: 20310 - protein, 9 aa, Artificial
  helical interface sequence
LSDLRVYLG

SEQ ID NO: 20311 - protein, 12 aa, Artificial
  helical interface sequence
TPGVISRVSQLF

SEQ ID NO: 20312 - protein, 25 aa, Artificial
  helical interface sequence
SDRMAACLRDMEIILRYVTYAVFAG

SEQ ID NO: 20313 - protein, 13 aa, Artificial
  helical interface sequence
ANKRLDAVNRITA

SEQ ID NO: 20314 - protein, 25 aa, Artificial
  helical interface sequence
SDRMAACLRDMEIILRYVTYAVFAG

SEQ ID NO: 20315 - protein, 25 aa, Artificial
  helical interface sequence
SDRMAACLRDMEIILRYVTYAVFAG

SEQ ID NO: 20316 - protein, 15 aa, Artificial
  helical interface sequence
EAAAGHAAEGYARAG

SEQ ID NO: 20317 - protein, 10 aa, Artificial
  helical interface sequence
VTPIANAWLD

SEQ ID NO: 20318 - protein, 5 aa, Artificial
  helical interface sequence
PERYA

SEQ ID NO: 20319 - protein, 26 aa, Artificial
  helical interface sequence
KEKDEMVEQEFNRLLEATSYLSHQLD

SEQ ID NO: 20320 - protein, 24 aa, Artificial
  helical interface sequence
LKDAEAVQKFFLEEIQLGEELLAQ

SEQ ID NO: 20321 - protein, 13 aa, Artificial
  helical interface sequence
PLASEIGADVLKK

SEQ ID NO: 20322 - protein, 11 aa, Artificial
  helical interface sequence
WGRVAMAIGKC

SEQ ID NO: 20323 - protein, 14 aa, Artificial
  helical interface sequence
EENIEFWLACEDFK

SEQ ID NO: 20324 - protein, 7 aa, Artificial
  helical interface sequence
REELVSQ

SEQ ID NO: 20325 - protein, 15 aa, Artificial
  helical interface sequence
YEEAYTAYYNGLDYL

SEQ ID NO: 20326 - protein, 7 aa, Artificial
  helical interface sequence
DEQLKSG

SEQ ID NO: 20327 - protein, 15 aa, Artificial
  helical interface sequence
TREGNDLYHEMIESG

SEQ ID NO: 20328 - protein, 6 aa, Artificial
  helical interface sequence
IIAILG

SEQ ID NO: 20329 - protein, 6 aa, Artificial
  helical interface sequence
DKLARL

SEQ ID NO: 20330 - protein, 17 aa, Artificial
  helical interface sequence
PLGILSNYVKTLLISMY

SEQ ID NO: 20331 - protein, 16 aa, Artificial
  helical interface sequence
PSTRNFFELNRGAIKC

SEQ ID NO: 20332 - protein, 17 aa, Artificial
  helical interface sequence
KEKRKEAVKKVIAAMTV

SEQ ID NO: 20333 - protein, 11 aa, Artificial
  helical interface sequence
VHQVVVAYAAG

SEQ ID NO: 20334 - protein, 16 aa, Artificial
  helical interface sequence
HAAVVKEAGDVVFKKY

SEQ ID NO: 20335 - protein, 6 aa, Artificial
  helical interface sequence
PSLQKV

SEQ ID NO: 20336 - protein, 13 aa, Artificial
  helical interface sequence
PGELDRIKSFVAS

SEQ ID NO: 20337 - protein, 8 aa, Artificial
  helical interface sequence
DKQWAGMM

SEQ ID NO: 20338 - protein, 29 aa, Artificial
  helical interface sequence
PEYWDGETRKVKAHSQTHRVDLGTLRGYY

SEQ ID NO: 20339 - protein, 7 aa, Artificial
  helical interface sequence
GFIKKFE

SEQ ID NO: 20340 - protein, 10 aa, Artificial
  helical interface sequence
FVILLILIAN

SEQ ID NO: 20341 - protein, 10 aa, Artificial
  helical interface sequence
NPVGVTHKLS

SEQ ID NO: 20342 - protein, 10 aa, Artificial
  helical interface sequence
EGLRASTESG

SEQ ID NO: 20343 - protein, 11 aa, Artificial
  helical interface sequence
NACGLFLKLHG

SEQ ID NO: 20344 - protein, 14 aa, Artificial
  helical interface sequence
RQAASLIRVAAAVG

SEQ ID NO: 20345 - protein, 10 aa, Artificial
  helical interface sequence
NACGLFLKLH

SEQ ID NO: 20346 - protein, 10 aa, Artificial
  helical interface sequence
SHVWREITRY

SEQ ID NO: 20347 - protein, 9 aa, Artificial
  helical interface sequence
WIDVYTRAT

SEQ ID NO: 20348 - protein, 6 aa, Artificial
  helical interface sequence
SEELQA

SEQ ID NO: 20349 - protein, 19 aa, Artificial
  helical interface sequence
NEYGYSHRVVDLLRYMFSR

SEQ ID NO: 20350 - protein, 16 aa, Artificial
  helical interface sequence
TQQSLELAFLVAEMLR

SEQ ID NO: 20351 - protein, 13 aa, Artificial
  helical interface sequence
AANLLQDMGQRLN

SEQ ID NO: 20352 - protein, 29 aa, Artificial
  helical interface sequence
FPEFLTMMARKMKDTDSEEEIREAFRVFD

SEQ ID NO: 20353 - protein, 29 aa, Artificial
  helical interface sequence
FPEFLTMMARKMKDTDSEEEIREAFRVFD

SEQ ID NO: 20354 - protein, 8 aa, Artificial
  helical interface sequence
VVENIIIG

SEQ ID NO: 20355 - protein, 7 aa, Artificial
  helical interface sequence
EIIARTL

SEQ ID NO: 20356 - protein, 6 aa, Artificial
  helical interface sequence
AMLLKD

SEQ ID NO: 20357 - protein, 6 aa, Artificial
  helical interface sequence
SIAEEE

SEQ ID NO: 20358 - protein, 8 aa, Artificial
  helical interface sequence
VVENIIIG

SEQ ID NO: 20359 - protein, 11 aa, Artificial
  helical interface sequence
EAKRLFEDNYK

SEQ ID NO: 20360 - protein, 11 aa, Artificial
  helical interface sequence
HLVEALYLVCG

SEQ ID NO: 20361 - protein, 5 aa, Artificial
  helical interface sequence
DLAVR

SEQ ID NO: 20362 - protein, 12 aa, Artificial
  helical interface sequence
QSKIWDVVEKAD

SEQ ID NO: 20363 - protein, 8 aa, Artificial
  helical interface sequence
LNVNELAT

SEQ ID NO: 20364 - protein, 11 aa, Artificial
  helical interface sequence
LARAHRAIHRL

SEQ ID NO: 20365 - protein, 18 aa, Artificial
  helical interface sequence
AMQRSRILRRAVDILRER

SEQ ID NO: 20366 - protein, 11 aa, Artificial
  helical interface sequence
LARAHRAIHRL

SEQ ID NO: 20367 - protein, 5 aa, Artificial
  helical interface sequence
NSILA

SEQ ID NO: 20368 - protein, 5 aa, Artificial
  helical interface sequence
TVWQK

SEQ ID NO: 20369 - protein, 15 aa, Artificial
  helical interface sequence
VAAASKILSNLVYQY

SEQ ID NO: 20370 - protein, 22 aa, Artificial
  helical interface sequence
AADTQAIADIVQYHLELYTSQY

SEQ ID NO: 20371 - protein, 22 aa, Artificial
  helical interface sequence
AGDTVQFAEYIQANIQLYSIRE

SEQ ID NO: 20372 - protein, 15 aa, Artificial
  helical interface sequence
VAAASKILSNLVYQY

SEQ ID NO: 20373 - protein, 18 aa, Artificial
  helical interface sequence
VQVAEEAIVNAMRVLYYR

SEQ ID NO: 20374 - protein, 22 aa, Artificial
  helical interface sequence
AGDTVQFAEYIQANIQLYSIRE

SEQ ID NO: 20375 - protein, 14 aa, Artificial
  helical interface sequence
FGAHMANPLLRKVV

SEQ ID NO: 20376 - protein, 14 aa, Artificial
  helical interface sequence
RSLANIFDEYTADL

SEQ ID NO: 20377 - protein, 9 aa, Artificial
  helical interface sequence
PEEVEEVIG

SEQ ID NO: 20378 - protein, 11 aa, Artificial
  helical interface sequence
GDKAAAVLEHY

SEQ ID NO: 20379 - protein, 11 aa, Artificial
  helical interface sequence
PELSRRIYLQM

SEQ ID NO: 20380 - protein, 5 aa, Artificial
  helical interface sequence
PQLLV

SEQ ID NO: 20381 - protein, 12 aa, Artificial
  helical interface sequence
LGNWVCAAKFES

SEQ ID NO: 20382 - protein, 11 aa, Artificial
  helical interface sequence
LYTWLDSMLTD

SEQ ID NO: 20383 - protein, 28 aa, Artificial
  helical interface sequence
GWLIRSIHRWSASMMVLMMILHVFRVYL

SEQ ID NO: 20384 - protein, 19 aa, Artificial
  helical interface sequence
TTDVEKSFDKLLKDLPELA

SEQ ID NO: 20385 - protein, 9 aa, Artificial
  helical interface sequence
RGYERIYNE

SEQ ID NO: 20386 - protein, 84 aa, Artificial; identical to SEQ ID NO: 14136
  helical interface sequence

SEQ ID NO: 20387 - protein, 51 aa, Artificial; identical to SEQ ID NO: 4807
  helical interface sequence

SEQ ID NO: 20388 - protein, 35 aa, Artificial
  helical interface sequence
TVPVLKAQADIYKADFQAERHAREKLVEKKEYLQE

SEQ ID NO: 20389 - protein, 14 aa, Artificial
  helical interface sequence
IQTLLSVINMGETL

SEQ ID NO: 20390 - protein, 5 aa, Artificial
  helical interface sequence
ICVAY

SEQ ID NO: 20391 - protein, 12 aa, Artificial
  helical interface sequence
FYTKNLLLNEGI

SEQ ID NO: 20392 - protein, 5 aa, Artificial
  helical interface sequence
NAIAF

SEQ ID NO: 20393 - protein, 9 aa, Artificial
  helical interface sequence
ISQEIRAAE

SEQ ID NO: 20394 - protein, 5 aa, Artificial
  helical interface sequence
YDDIV

SEQ ID NO: 20395 - protein, 9 aa, Artificial
  helical interface sequence
WFDILDDWL

SEQ ID NO: 20396 - protein, 18 aa, Artificial
  helical interface sequence
RTSLYLGLLLILVLALLF

SEQ ID NO: 20397 - protein, 9 aa, Artificial
  helical interface sequence
LWIVATVAG

SEQ ID NO: 20398 - protein, 6 aa, Artificial
  helical interface sequence
PVAFRG

SEQ ID NO: 20399 - protein, 11 aa, Artificial
  helical interface sequence
GRDLTDYLMKI

SEQ ID NO: 20400 - protein, 6 aa, Artificial
  helical interface sequence
PSFIGM

SEQ ID NO: 20401 - protein, 20 aa, Artificial
  helical interface sequence
QIGMIQALGGFFTYFVILAE

SEQ ID NO: 20402 - protein, 10 aa, Artificial
  helical interface sequence
TEIGIEMKFK

SEQ ID NO: 20403 - protein, 8 aa, Artificial
  helical interface sequence
VEEIEDAF

SEQ ID NO: 20404 - protein, 19 aa, Artificial
  helical interface sequence
PEVHVSMDKFLSLLSWSLS

SEQ ID NO: 20405 - protein, 20 aa, Artificial
  helical interface sequence
PDNFRLLADCITVCVAMKFG

SEQ ID NO: 20406 - protein, 11 aa, Artificial
  helical interface sequence
TFAFAAQLEFA

SEQ ID NO: 20407 - protein, 6 aa, Artificial
  helical interface sequence
SEQLTS

SEQ ID NO: 20408 - protein, 15 aa, Artificial
  helical interface sequence
HASDVLLNLNRLRSR

SEQ ID NO: 20409 - protein, 15 aa, Artificial
  helical interface sequence
HASDVLLNLNRLRSR

SEQ ID NO: 20410 - protein, 14 aa, Artificial
  helical interface sequence
KLGDGLFRNIITEI

SEQ ID NO: 20411 - protein, 11 aa, Artificial
  helical interface sequence
VDNASMQAVAK

SEQ ID NO: 20412 - protein, 15 aa, Artificial
  helical interface sequence
SMYGTILGNIGAALI

SEQ ID NO: 20413 - protein, 14 aa, Artificial
  helical interface sequence
KLGDGLFRNIITEI

SEQ ID NO: 20414 - protein, 14 aa, Artificial
  helical interface sequence
KLGDGLFRNIITEI

SEQ ID NO: 20415 - protein, 11 aa, Artificial
  helical interface sequence
VDNASMQAVAK

SEQ ID NO: 20416 - protein, 25 aa, Artificial
  helical interface sequence
DEYLAVAKVTALGISLLGIIGYIIH

SEQ ID NO: 20417 - protein, 11 aa, Artificial
  helical interface sequence
IETCKIMVDML

SEQ ID NO: 20418 - protein, 6 aa, Artificial
  helical interface sequence
KNFFLT

SEQ ID NO: 20419 - protein, 19 aa, Artificial
  helical interface sequence
EKETFCRAATVLRQFYSHH

SEQ ID NO: 20420 - protein, 16 aa, Artificial
  helical interface sequence
ITLQEIIKTLNSLTEQ

SEQ ID NO: 20421 - protein, 8 aa, Artificial
  helical interface sequence
VDYLLQNL

SEQ ID NO: 20422 - protein, 22 aa, Artificial
  helical interface sequence
EAVVESSRKLVKEAAVIICIKN

SEQ ID NO: 20423 - protein, 15 aa, Artificial
  helical interface sequence
SRLLRVMQCLSRIEE

SEQ ID NO: 20424 - protein, 16 aa, Artificial
  helical interface sequence
LKDYEDQQKQLEQVIA

SEQ ID NO: 20425 - protein, 7 aa, Artificial
  helical interface sequence
WIQYKEG

SEQ ID NO: 20426 - protein, 10 aa, Artificial
  helical interface sequence
WDEAEKFCRA

SEQ ID NO: 20427 - protein, 12 aa, Artificial
  helical interface sequence
EAELQDMINEVD

SEQ ID NO: 20428 - protein, 16 aa, Artificial
  helical interface sequence
QKMILILTASIMYWSL

SEQ ID NO: 20429 - protein, 10 aa, Artificial
  helical interface sequence
LWERFCNWVT

SEQ ID NO: 20430 - protein, 19 aa, Artificial
  helical interface sequence
EKDLVAIAGHILVEPKILG

SEQ ID NO: 20431 - protein, 19 aa, Artificial
  helical interface sequence
FYTKNLLLNEGIRAWMAPQ

SEQ ID NO: 20432 - protein, 6 aa, Artificial
  helical interface sequence
VVDEKL

SEQ ID NO: 20433 - protein, 26 aa, Artificial
  helical interface sequence
DRSKQLIFLGSGLWIALVLVVGVLNF

SEQ ID NO: 20434 - protein, 7 aa, Artificial
  helical interface sequence
EEELARA

SEQ ID NO: 20435 - protein, 24 aa, Artificial
  helical interface sequence
LWIVATVAGMGVIVIVGLFFYGAY

SEQ ID NO: 20436 - protein, 24 aa, Artificial
  helical interface sequence
LWIVATVAGMGVIVIVGLFFYGAY

SEQ ID NO: 20437 - protein, 9 aa, Artificial
  helical interface sequence
LTMIAMIGI

SEQ ID NO: 20438 - protein, 7 aa, Artificial
  helical interface sequence
IFLLAVR

SEQ ID NO: 20439 - protein, 5 aa, Artificial
  helical interface sequence
KDEYE

SEQ ID NO: 20440 - protein, 18 aa, Artificial
  helical interface sequence
IDEVLRLLVWLEEVENAG

SEQ ID NO: 20441 - protein, 9 aa, Artificial
  helical interface sequence
EQVKSDIEN

SEQ ID NO: 20442 - protein, 20 aa, Artificial
  helical interface sequence
IDEVLRLLVWLEEVENAGKD

SEQ ID NO: 20443 - protein, 19 aa, Artificial
  helical interface sequence
LECLRLLNEIIADFDDLLS

SEQ ID NO: 20444 - protein, 14 aa, Artificial
  helical interface sequence
FHCWDYRRFVAAQA

SEQ ID NO: 20445 - protein, 8 aa, Artificial
  helical interface sequence
MREFLKVI

SEQ ID NO: 20446 - protein, 6 aa, Artificial
  helical interface sequence
KDSYPR

SEQ ID NO: 20447 - protein, 23 aa, Artificial
  helical interface sequence
VADARVLVDFARISAQQEKVTYG

SEQ ID NO: 20448 - protein, 5 aa, Artificial
  helical interface sequence
SDFLL

SEQ ID NO: 20449 - protein, 10 aa, Artificial
  helical interface sequence
IPEAMGFAKK

SEQ ID NO: 20450 - protein, 6 aa, Artificial
  helical interface sequence
YFKQSF

SEQ ID NO: 20451 - protein, 7 aa, Artificial
  helical interface sequence
SEQLTSG

SEQ ID NO: 20452 - protein, 7 aa, Artificial
  helical interface sequence
DEQLKSG

SEQ ID NO: 20453 - protein, 7 aa, Artificial
  helical interface sequence
DEQLKSG

SEQ ID NO: 20454 - protein, 18 aa, Artificial
  helical interface sequence
GATFAVSGLLIGEWINRY

SEQ ID NO: 20455 - protein, 28 aa, Artificial
  helical interface sequence
SQEEQCLSNCVNRFLDTNIRIVNGLQNT

SEQ ID NO: 20456 - protein, 20 aa, Artificial
  helical interface sequence
KQKVQMSIHQFTNICFKKCV

SEQ ID NO: 20457 - protein, 20 aa, Artificial
  helical interface sequence
KQKVQMSIHQFTNICFKKCV

SEQ ID NO: 20458 - protein, 12 aa, Artificial
  helical interface sequence
IMEFVKAFNAAT

SEQ ID NO: 20459 - protein, 12 aa, Artificial
  helical interface sequence
IMEFVKAFNAAT

SEQ ID NO: 20460 - protein, 52 aa, Artificial; identical to SEQ ID NO: 11494
  helical interface sequence

SEQ ID NO: 20461 - protein, 8 aa, Artificial
  helical interface sequence
PGGKTVRR

SEQ ID NO: 20462 - protein, 9 aa, Artificial
  helical interface sequence
SKCENNADL

SEQ ID NO: 20463 - protein, 24 aa, Artificial
  helical interface sequence
PAEREAELDDLKTELLNARAVQAA

SEQ ID NO: 20464 - protein, 6 aa, Artificial
  helical interface sequence
SEQLTS

SEQ ID NO: 20465 - protein, 5 aa, Artificial
  helical interface sequence
SAYYR

SEQ ID NO: 20466 - protein, 13 aa, Artificial
  helical interface sequence
ILNRKAIDFLLQR

SEQ ID NO: 20467 - protein, 9 aa, Artificial
  helical interface sequence
KSCLLLRFS

SEQ ID NO: 20468 - protein, 17 aa, Artificial
  helical interface sequence
TQVLQYIYSHIYVKYVS

SEQ ID NO: 20469 - protein, 10 aa, Artificial
  helical interface sequence
PEDLVNACKM

SEQ ID NO: 20470 - protein, 22 aa, Artificial
  helical interface sequence
VDTRQKQLAAWCSLVLSFCRLH

SEQ ID NO: 20471 - protein, 35 aa, Artificial; identical to SEQ ID NO: 651
  helical interface sequence

SEQ ID NO: 20472 - protein, 14 aa, Artificial
  helical interface sequence
MTNVTFDYLHATAF

SEQ ID NO: 20473 - protein, 23 aa, Artificial
  helical interface sequence
PLSQTLFWLLVANLLILTWIGSQ

SEQ ID NO: 20474 - protein, 23 aa, Artificial
  helical interface sequence
EEGKALVHHYEECAERVKIQQQQ

SEQ ID NO: 20475 - protein, 27 aa, Artificial
  helical interface sequence
VGTIFAGAFVFQTVFDTAITSWYENHN

SEQ ID NO: 20476 - protein, 17 aa, Artificial
  helical interface sequence
VEEFFHLQHYLDTATAP

SEQ ID NO: 20477 - protein, 9 aa, Artificial
  helical interface sequence
KLLDNIQEY

SEQ ID NO: 20478 - protein, 12 aa, Artificial
  helical interface sequence
ALKLVRESELLG

SEQ ID NO: 20479 - protein, 22 aa, Artificial
  helical interface sequence
PHELTESVLPAARYDYAVAEQC

SEQ ID NO: 20480 - protein, 5 aa, Artificial
  helical interface sequence
AGIKT

SEQ ID NO: 20481 - protein, 10 aa, Artificial
  helical interface sequence
PRLENAARSL

SEQ ID NO: 20482 - protein, 18 aa, Artificial
  helical interface sequence
HRLIDQATAEIVETAKRT

SEQ ID NO: 20483 - protein, 18 aa, Artificial
  helical interface sequence
HRLIDQATAEIVETAKRT

SEQ ID NO: 20484 - protein, 18 aa, Artificial
  helical interface sequence
HRLIDQATAEIVETAKRT

SEQ ID NO: 20485 - protein, 19 aa, Artificial
  helical interface sequence
PVNFKFLSHCLLVTLACHH

SEQ ID NO: 20486 - protein, 10 aa, Artificial
  helical interface sequence
KADVERLRKG

SEQ ID NO: 20487 - protein, 9 aa, Artificial
  helical interface sequence
GALIKLVES

SEQ ID NO: 20488 - protein, 16 aa, Artificial
  helical interface sequence
ARILEKAAQELALITG

SEQ ID NO: 20489 - protein, 9 aa, Artificial
  helical interface sequence
GALIKLVES

SEQ ID NO: 20490 - protein, 18 aa, Artificial
  helical interface sequence
WTQCQQLSQKLCTLAWSA

SEQ ID NO: 20491 - protein, 6 aa, Artificial
  helical interface sequence
SEQLTS

SEQ ID NO: 20492 - protein, 5 aa, Artificial
  helical interface sequence
NHVKK

SEQ ID NO: 20493 - protein, 9 aa, Artificial
  helical interface sequence
YRLTQGVVK

SEQ ID NO: 20494 - protein, 11 aa, Artificial
  helical interface sequence
DDYVHEFCRYG

SEQ ID NO: 20495 - protein, 12 aa, Artificial
  helical interface sequence
VVTKSIVNADAE

SEQ ID NO: 20496 - protein, 7 aa, Artificial
  helical interface sequence
PLLCEIW

SEQ ID NO: 20497 - protein, 15 aa, Artificial
  helical interface sequence
ATELMNILNKVVTRH

SEQ ID NO: 20498 - protein, 5 aa, Artificial
  helical interface sequence
EEQLF

SEQ ID NO: 20499 - protein, 7 aa, Artificial
  helical interface sequence
IVDRFLA

SEQ ID NO: 20500 - protein, 16 aa, Artificial
  helical interface sequence
IIFTFLALIVFRMGIY

SEQ ID NO: 20501 - protein, 12 aa, Artificial
  helical interface sequence
KTEEEEFRNIYN

SEQ ID NO: 20502 - protein, 33 aa, Artificial; identical to SEQ ID NO: 104
  helical interface sequence

SEQ ID NO: 20503 - protein, 13 aa, Artificial
  helical interface sequence
RIGRMVFQALCED

SEQ ID NO: 20504 - protein, 15 aa, Artificial
  helical interface sequence
PSIKALILQIDAKMS

SEQ ID NO: 20505 - protein, 13 aa, Artificial
  helical interface sequence
DEVLLALAEQLGT

SEQ ID NO: 20506 - protein, 13 aa, Artificial
  helical interface sequence
YAIREAATSNLKK

SEQ ID NO: 20507 - protein, 12 aa, Artificial
  helical interface sequence
YLHRMTTLFCIN

SEQ ID NO: 20508 - protein, 6 aa, Artificial
  helical interface sequence
NDALKK

SEQ ID NO: 20509 - protein, 7 aa, Artificial
  helical interface sequence
EAEISHT

SEQ ID NO: 20510 - protein, 7 aa, Artificial
  helical interface sequence
LVSKMRD

SEQ ID NO: 20511 - protein, 8 aa, Artificial
  helical interface sequence
YKWLSYTL

SEQ ID NO: 20512 - protein, 20 aa, Artificial
  helical interface sequence
VNQAKQMLYDYVERKRKENS

SEQ ID NO: 20513 - protein, 18 aa, Artificial
  helical interface sequence
SVVGNILRIYESIADYHF

SEQ ID NO: 20514 - protein, 8 aa, Artificial
  helical interface sequence
MDDVYNYI

SEQ ID NO: 20515 - protein, 16 aa, Artificial
  helical interface sequence
NVKFIQEKKLIGRYFD

SEQ ID NO: 20516 - protein, 12 aa, Artificial
  helical interface sequence
SYVKEELSKAAF

SEQ ID NO: 20517 - protein, 29 aa, Artificial
  helical interface sequence
PEYWERITQVAKGQEQWFRVNLRTLLGYY

SEQ ID NO: 20518 - protein, 17 aa, Artificial
  helical interface sequence
MDVFVQQYADTVKYLSE

SEQ ID NO: 20519 - protein, 14 aa, Artificial
  helical interface sequence
TAEFAQLLENSILS

SEQ ID NO: 20520 - protein, 16 aa, Artificial
  helical interface sequence
ENVKRASLLALGYMCE

SEQ ID NO: 20521 - protein, 12 aa, Artificial
  helical interface sequence
YTEQLRRAARRN

SEQ ID NO: 20522 - protein, 22 aa, Artificial
  helical interface sequence
EGEFSEAREDMAALEKDYEEVG

SEQ ID NO: 20523 - protein, 10 aa, Artificial
  helical interface sequence
EEKQQPLREK

SEQ ID NO: 20524 - protein, 15 aa, Artificial
  helical interface sequence
SRNQHEIIRCLKAFM

SEQ ID NO: 20525 - protein, 10 aa, Artificial
  helical interface sequence
EEKQQPLREK

SEQ ID NO: 20526 - protein, 7 aa, Artificial
  helical interface sequence
DEEAEKI

SEQ ID NO: 20527 - protein, 17 aa, Artificial
  helical interface sequence
LKLLLGELFFLSKLQRH

SEQ ID NO: 20528 - protein, 11 aa, Artificial
  helical interface sequence
RPILQGFRTFA

SEQ ID NO: 20529 - protein, 8 aa, Artificial
  helical interface sequence
PEKIRNAC

SEQ ID NO: 20530 - protein, 8 aa, Artificial
  helical interface sequence
VEEIEDAF

SEQ ID NO: 20531 - protein, 7 aa, Artificial
  helical interface sequence
KQVKSVA

SEQ ID NO: 20532 - protein, 5 aa, Artificial
  helical interface sequence
RLANE

SEQ ID NO: 20533 - protein, 6 aa, Artificial
  helical interface sequence
ESVFRF

SEQ ID NO: 20534 - protein, 10 aa, Artificial
  helical interface sequence
DTHSILLNAL

SEQ ID NO: 20535 - protein, 7 aa, Artificial
  helical interface sequence
FNFSMQA

SEQ ID NO: 20536 - protein, 12 aa, Artificial
  helical interface sequence
VKDIIFAIKKTL

SEQ ID NO: 20537 - protein, 13 aa, Artificial
  helical interface sequence
GQIFEAYNMAALW

SEQ ID NO: 20538 - protein, 11 aa, Artificial
  helical interface sequence
REEIQEVRSKS

SEQ ID NO: 20539 - protein, 9 aa, Artificial
  helical interface sequence
NNCIESIRN

SEQ ID NO: 20540 - protein, 28 aa, Artificial
  helical interface sequence
RIQDLEKYVEDTKIDLWSYNAELLVALE

SEQ ID NO: 20541 - protein, 19 aa, Artificial
  helical interface sequence
LKSTQAAIDQINGKLNRVI

SEQ ID NO: 20542 - protein, 52 aa, Artificial; identical to SEQ ID NO: 329
  helical interface sequence

SEQ ID NO: 20543 - protein, 7 aa, Artificial
  helical interface sequence
HLLIPRT

SEQ ID NO: 20544 - protein, 9 aa, Artificial
  helical interface sequence
NSFAFELCS

SEQ ID NO: 20545 - protein, 7 aa, Artificial
  helical interface sequence
IAELLPH

SEQ ID NO: 20546 - protein, 9 aa, Artificial
  helical interface sequence
NSFAFELCS

SEQ ID NO: 20547 - protein, 7 aa, Artificial
  helical interface sequence
IAELLPH

SEQ ID NO: 20548 - protein, 8 aa, Artificial
  helical interface sequence
VAWRNRCK

SEQ ID NO: 20549 - protein, 21 aa, Artificial
  helical interface sequence
QVIMEKSTMLYNKFKNMFLVG

SEQ ID NO: 20550 - protein, 13 aa, Artificial
  helical interface sequence
GRQTALFLLKLAS

SEQ ID NO: 20551 - protein, 6 aa, Artificial
  helical interface sequence
VLEVLF

SEQ ID NO: 20552 - protein, 13 aa, Artificial
  helical interface sequence
GRQTALFLLKLAS

SEQ ID NO: 20553 - protein, 23 aa, Artificial
  helical interface sequence
REDQIALLKTSAIEVMLLETSRR

SEQ ID NO: 20554 - protein, 23 aa, Artificial
  helical interface sequence
REDQIALLKTSAIEVMLLETSRR

SEQ ID NO: 20555 - protein, 11 aa, Artificial
  helical interface sequence
LFTLVEWAKRI

SEQ ID NO: 20556 - protein, 10 aa, Artificial
  helical interface sequence
VNLYQNYSEL

SEQ ID NO: 20557 - protein, 24 aa, Artificial
  helical interface sequence
SNRAKDICRNFLGHWYDSYVNATK

SEQ ID NO: 20558 - protein, 10 aa, Artificial
  helical interface sequence
KSTLLRMIAG

SEQ ID NO: 20559 - protein, 11 aa, Artificial
  helical interface sequence
RICLRELAHKG

SEQ ID NO: 20560 - protein, 15 aa, Artificial
  helical interface sequence
LSKQAVAYRQLSLLL

SEQ ID NO: 20561 - protein, 7 aa, Artificial
  helical interface sequence
RGISELG

SEQ ID NO: 20562 - protein, 10 aa, Artificial
  helical interface sequence
PAPATTFAHL

SEQ ID NO: 20563 - protein, 10 aa, Artificial
  helical interface sequence
YIPTNVISIT

SEQ ID NO: 20564 - protein, 11 aa, Artificial
  helical interface sequence
FQESALIADKL

SEQ ID NO: 20565 - protein, 22 aa, Artificial
  helical interface sequence
KESTQKAIDGVTNKVNSIIDKM

SEQ ID NO: 20566 - protein, 10 aa, Artificial
  helical interface sequence
YEELKHLLSR

SEQ ID NO: 20567 - protein, 18 aa, Artificial
  helical interface sequence
RELMETGRSVVQKYLNDC

SEQ ID NO: 20568 - protein, 19 aa, Artificial
  helical interface sequence
PECQAAWQKLVRVVAHALA

SEQ ID NO: 20569 - protein, 11 aa, Artificial
  helical interface sequence
IKNLRRVAKEL

SEQ ID NO: 20570 - protein, 11 aa, Artificial
  helical interface sequence
AAELRHVMTNL

SEQ ID NO: 20571 - protein, 5 aa, Artificial
  helical interface sequence
IRDAW

SEQ ID NO: 20572 - protein, 6 aa, Artificial
  helical interface sequence
SEELQA

SEQ ID NO: 20573 - protein, 16 aa, Artificial
  helical interface sequence
VAQFVKDLLLHLKKLF

SEQ ID NO: 20574 - protein, 11 aa, Artificial
  helical interface sequence
QSKIWDVVEKA

SEQ ID NO: 20575 - protein, 10 aa, Artificial
  helical interface sequence
YEELKHLLSR

SEQ ID NO: 20576 - protein, 22 aa, Artificial
  helical interface sequence
WDLFLKDIDELHHSYHMGVWYW

SEQ ID NO: 20577 - protein, 5 aa, Artificial
  helical interface sequence
EEQLF

SEQ ID NO: 20578 - protein, 19 aa, Artificial
  helical interface sequence
YTFANLISSIQTDESRHAQ

SEQ ID NO: 20579 - protein, 6 aa, Artificial
  helical interface sequence
NVEAVS

SEQ ID NO: 20580 - protein, 23 aa, Artificial
  helical interface sequence
LHQVENKTSEVKQLIKAIQLTYN

SEQ ID NO: 20581 - protein, 14 aa, Artificial
  helical interface sequence
LKDYEDQQKQLEQV

SEQ ID NO: 20582 - protein, 24 aa, Artificial
  helical interface sequence
RVLRSILENLRSKIQKLESDVSAQ

SEQ ID NO: 20583 - protein, 29 aa, Artificial
  helical interface sequence
GCRMKGLIDEVNQDFTNRINKLKNSLFEY

SEQ ID NO: 20584 - protein, 14 aa, Artificial
  helical interface sequence
TCGIADFLSTYQTK

SEQ ID NO: 20585 - protein, 23 aa, Artificial
  helical interface sequence
LHQVENKTSEVKQLIKAIQLTYN

SEQ ID NO: 20586 - protein, 17 aa, Artificial
  helical interface sequence
PEHRTNFFLLLQAVNSH

SEQ ID NO: 20587 - protein, 5 aa, Artificial
  helical interface sequence
DGYYI

SEQ ID NO: 20588 - protein, 19 aa, Artificial
  helical interface sequence
QTQLRQAVQLLTRTELTLK

SEQ ID NO: 20589 - protein, 12 aa, Artificial
  helical interface sequence
VWAELEGLSLLL

SEQ ID NO: 20590 - protein, 15 aa, Artificial
  helical interface sequence
LLALAQALERLSLLW

SEQ ID NO: 20591 - protein, 9 aa, Artificial
  helical interface sequence
RRDWQLQQL

SEQ ID NO: 20592 - protein, 14 aa, Artificial
  helical interface sequence
SKRALHILQQLRLE

SEQ ID NO: 20593 - protein, 11 aa, Artificial
  helical interface sequence
WAELEGLSLLL

SEQ ID NO: 20594 - protein, 13 aa, Artificial
  helical interface sequence
EHVLTALANGLSL

SEQ ID NO: 20595 - protein, 18 aa, Artificial
  helical interface sequence
LVYLNVMELVRAVLELKN

SEQ ID NO: 20596 - protein, 17 aa, Artificial
  helical interface sequence
LVYLNVMELVRAVLELK

SEQ ID NO: 20597 - protein, 5 aa, Artificial
  helical interface sequence
PVTEK

SEQ ID NO: 20598 - protein, 7 aa, Artificial
  helical interface sequence
KSIAKTL

SEQ ID NO: 20599 - protein, 6 aa, Artificial
  helical interface sequence
EETRAE

SEQ ID NO: 20600 - protein, 8 aa, Artificial
  helical interface sequence
DEEIIQLH

SEQ ID NO: 20601 - protein, 8 aa, Artificial
  helical interface sequence
KWESYLNL

SEQ ID NO: 20602 - protein, 14 aa, Artificial
  helical interface sequence
VDYIMGLAAIYQIK

SEQ ID NO: 20603 - protein, 6 aa, Artificial
  helical interface sequence
FDVARN

SEQ ID NO: 20604 - protein, 19 aa, Artificial
  helical interface sequence
YLKAQKVRRLITNDFLKAF

SEQ ID NO: 20605 - protein, 17 aa, Artificial
  helical interface sequence
PQVKEAFENFIKELEKE

SEQ ID NO: 20606 - protein, 15 aa, Artificial
  helical interface sequence
TKIGKEVIKEMVETG

SEQ ID NO: 20607 - protein, 20 aa, Artificial
  helical interface sequence
DIIAAAKRMALLMAEMSRLV

SEQ ID NO: 20608 - protein, 7 aa, Artificial
  helical interface sequence
AESLRRN

SEQ ID NO: 20609 - protein, 24 aa, Artificial
  helical interface sequence
YQGWQTQWNQALEDLVRAYQSMSG

SEQ ID NO: 20610 - protein, 13 aa, Artificial
  helical interface sequence
IPDLLIAATAELS

SEQ ID NO: 20611 - protein, 28 aa, Artificial
  helical interface sequence
NQQWEKLQHMFQVYRVSFTRDIQELVKM

SEQ ID NO: 20612 - protein, 24 aa, Artificial
  helical interface sequence
VAEQLRAYLEGTCVEWLRRYLENG

SEQ ID NO: 20613 - protein, 7 aa, Artificial
  helical interface sequence
PEYFIKG

SEQ ID NO: 20614 - protein, 11 aa, Artificial
  helical interface sequence
VVEWLGWFEDQ

SEQ ID NO: 20615 - protein, 10 aa, Artificial
  helical interface sequence
VKHIYEFLKA

SEQ ID NO: 20616 - protein, 6 aa, Artificial
  helical interface sequence
QSVGEP

SEQ ID NO: 20617 - protein, 10 aa, Artificial
  helical interface sequence
DEILAHRLAL

SEQ ID NO: 20618 - protein, 11 aa, Artificial
  helical interface sequence
PTELFFHAAGG

SEQ ID NO: 20619 - protein, 8 aa, Artificial
  helical interface sequence
YMQRRLIN

SEQ ID NO: 20620 - protein, 8 aa, Artificial
  helical interface sequence
VVENIIIG

SEQ ID NO: 20621 - protein, 12 aa, Artificial
  helical interface sequence
IEQLQNEILRYG

SEQ ID NO: 20622 - protein, 5 aa, Artificial
  helical interface sequence
IDEAY

SEQ ID NO: 20623 - protein, 5 aa, Artificial
  helical interface sequence
KSIAK

SEQ ID NO: 20624 - protein, 11 aa, Artificial
  helical interface sequence
EETRAELSQLC

SEQ ID NO: 20625 - protein, 10 aa, Artificial
  helical interface sequence
VEGISKLLRE

SEQ ID NO: 20626 - protein, 25 aa, Artificial
  helical interface sequence
LKLQVLLDEEYKQLVKDRKFLREVF

SEQ ID NO: 20627 - protein, 5 aa, Artificial
  helical interface sequence
KSIAK

SEQ ID NO: 20628 - protein, 11 aa, Artificial
  helical interface sequence
EIIQNAQRDAV

SEQ ID NO: 20629 - protein, 15 aa, Artificial
  helical interface sequence
YRHMALLVDVMTTQG

SEQ ID NO: 20630 - protein, 7 aa, Artificial
  helical interface sequence
LIEKFLR

SEQ ID NO: 20631 - protein, 17 aa, Artificial
  helical interface sequence
KYERARILGTRALQISM

SEQ ID NO: 20632 - protein, 8 aa, Artificial
  helical interface sequence
PIDIRILN

SEQ ID NO: 20633 - protein, 10 aa, Artificial
  helical interface sequence
LLQQCFLEAG

SEQ ID NO: 20634 - protein, 11 aa, Artificial
  helical interface sequence
QAKIWDTIEKS

SEQ ID NO: 20635 - protein, 29 aa, Artificial
  helical interface sequence
DQQWETLQHIFRVYRSSFTRDVKEFAKML

SEQ ID NO: 20636 - protein, 16 aa, Artificial
  helical interface sequence
VDTARTLFNQVMEKEF

SEQ ID NO: 20637 - protein, 8 aa, Artificial
  helical interface sequence
RLRLVEEL

SEQ ID NO: 20638 - protein, 14 aa, Artificial
  helical interface sequence
RRDQARQLIIDLET

SEQ ID NO: 20639 - protein, 8 aa, Artificial
  helical interface sequence
IQVERDKL

SEQ ID NO: 20640 - protein, 7 aa, Artificial
  helical interface sequence
LYQLENY

SEQ ID NO: 20641 - protein, 19 aa, Artificial
  helical interface sequence
VNQHLCGSHLVEALYLVCG

SEQ ID NO: 20642 - protein, 12 aa, Artificial
  helical interface sequence
APGLDFLKCAFA

SEQ ID NO: 20643 - protein, 13 aa, Artificial
  helical interface sequence
EVDLLEEELGHLT

SEQ ID NO: 20644 - protein, 15 aa, Artificial
  helical interface sequence
AATLEEKLNKIFEKL

SEQ ID NO: 20645 - protein, 13 aa, Artificial
  helical interface sequence
EVDLLEEELGHLT

SEQ ID NO: 20646 - protein, 8 aa, Artificial
  helical interface sequence
AEELAEIF

SEQ ID NO: 20647 - protein, 6 aa, Artificial
  helical interface sequence
LYQLEN

SEQ ID NO: 20648 - protein, 20 aa, Artificial
  helical interface sequence
PENFKLLGNVMVIILATHFG

SEQ ID NO: 20649 - protein, 21 aa, Artificial
  helical interface sequence
QAAMQMLKETINEEAAEWDRL

SEQ ID NO: 20650 - protein, 9 aa, Artificial
  helical interface sequence
PRKVLSEMG

SEQ ID NO: 20651 - protein, 14 aa, Artificial
  helical interface sequence
PQTREHILLARQVG

SEQ ID NO: 20652 - protein, 7 aa, Artificial
  helical interface sequence
VFGPNLL

SEQ ID NO: 20653 - protein, 6 aa, Artificial
  helical interface sequence
NTNLAV

SEQ ID NO: 20654 - protein, 7 aa, Artificial
  helical interface sequence
VFGPNLL

SEQ ID NO: 20655 - protein, 6 aa, Artificial
  helical interface sequence
DRLRPL

SEQ ID NO: 20656 - protein, 11 aa, Artificial
  helical interface sequence
LPVLEAVAKAG

SEQ ID NO: 20657 - protein, 10 aa, Artificial
  helical interface sequence
RPDAEYWNSQ

SEQ ID NO: 20658 - protein, 7 aa, Artificial
  helical interface sequence
KDARDCI

SEQ ID NO: 20659 - protein, 5 aa, Artificial
  helical interface sequence
VHTLL

SEQ ID NO: 20660 - protein, 14 aa, Artificial
  helical interface sequence
GELRVRAATTIAAN

SEQ ID NO: 20661 - protein, 14 aa, Artificial
  helical interface sequence
GELRVRAATTIAAN

SEQ ID NO: 20662 - protein, 7 aa, Artificial
  helical interface sequence
AQRARKG

SEQ ID NO: 20663 - protein, 8 aa, Artificial
  helical interface sequence
VWYNMLNQ

SEQ ID NO: 20664 - protein, 14 aa, Artificial
  helical interface sequence
ERSWFREAEIYQTV

SEQ ID NO: 20665 - protein, 35 aa, Artificial; identical to SEQ ID NO: 7521
  helical interface sequence

SEQ ID NO: 20666 - protein, 13 aa, Artificial
  helical interface sequence
YSRLRKMLYLIYV

SEQ ID NO: 20667 - protein, 14 aa, Artificial
  helical interface sequence
YDALRRLLYMIYMS

SEQ ID NO: 20668 - protein, 20 aa, Artificial
  helical interface sequence
DSQIEKERDVILQELQENDT

SEQ ID NO: 20669 - protein, 8 aa, Artificial
  helical interface sequence
ADLCWEAG

SEQ ID NO: 20670 - protein, 9 aa, Artificial
  helical interface sequence
FEDYVEGLR

SEQ ID NO: 20671 - protein, 5 aa, Artificial
  helical interface sequence
FQEFR

SEQ ID NO: 20672 - protein, 8 aa, Artificial
  helical interface sequence
PLFLEVFE

SEQ ID NO: 20673 - protein, 8 aa, Artificial
  helical interface sequence
PLFLEVFE

SEQ ID NO: 20674 - protein, 6 aa, Artificial
  helical interface sequence
YKQVKQ

SEQ ID NO: 20675 - protein, 20 aa, Artificial
  helical interface sequence
WRDRFLFVMDAVNKASAATG

SEQ ID NO: 20676 - protein, 15 aa, Artificial
  helical interface sequence
PPSISSVLTILYYGA

SEQ ID NO: 20677 - protein, 8 aa, Artificial
  helical interface sequence
KNFLEASY

SEQ ID NO: 20678 - protein, 8 aa, Artificial
  helical interface sequence
EEVEELLE

SEQ ID NO: 20679 - protein, 11 aa, Artificial
  helical interface sequence
EAELQDMINEV

SEQ ID NO: 20680 - protein, 15 aa, Artificial
  helical interface sequence
EEQIAEFKEAFSLFD

SEQ ID NO: 20681 - protein, 16 aa, Artificial
  helical interface sequence
DTDSEEEIREAFRVFD

SEQ ID NO: 20682 - protein, 18 aa, Artificial
  helical interface sequence
GGLINKKCYEMASHLRRS

SEQ ID NO: 20683 - protein, 12 aa, Artificial
  helical interface sequence
EAELQDMINEVD

SEQ ID NO: 20684 - protein, 7 aa, Artificial
  helical interface sequence
DEQLKSG

SEQ ID NO: 20685 - protein, 12 aa, Artificial
  helical interface sequence
DEEVDEMIREAD

SEQ ID NO: 20686 - protein, 10 aa, Artificial
  helical interface sequence
FPEFLTMMAR

SEQ ID NO: 20687 - protein, 5 aa, Artificial
  helical interface sequence
VKELL

SEQ ID NO: 20688 - protein, 39 aa, Artificial
  helical interface sequence
PGVQQQLELERERLRREIRKELKLKEGAENLRRATTDLG

SEQ ID NO: 20689 - protein, 15 aa, Artificial
  helical interface sequence
KKEIGRSYRFIARNL

SEQ ID NO: 20690 - protein, 15 aa, Artificial
  helical interface sequence
QIVATDVCQFLELCQ

SEQ ID NO: 20691 - protein, 20 aa, Artificial
  helical interface sequence
EQKLKLYQSATQAVFQKRQA

SEQ ID NO: 20692 - protein, 9 aa, Artificial
  helical interface sequence
FPSFIHSQK

SEQ ID NO: 20693 - protein, 9 aa, Artificial
  helical interface sequence
FPSFIHSQK

SEQ ID NO: 20694 - protein, 6 aa, Artificial
  helical interface sequence
SQLRDL

SEQ ID NO: 20695 - protein, 11 aa, Artificial
  helical interface sequence
VAFVAVEGNRL

SEQ ID NO: 20696 - protein, 10 aa, Artificial
  helical interface sequence
EATELKLGML

SEQ ID NO: 20697 - protein, 9 aa, Artificial
  helical interface sequence
DVAARLRAA

SEQ ID NO: 20698 - protein, 9 aa, Artificial
  helical interface sequence
SAAGEFADD

SEQ ID NO: 20699 - protein, 8 aa, Artificial
  helical interface sequence
RETAASLL

SEQ ID NO: 20700 - protein, 6 aa, Artificial
  helical interface sequence
VAWRNR

SEQ ID NO: 20701 - protein, 5 aa, Artificial
  helical interface sequence
EFFRK

SEQ ID NO: 20702 - protein, 12 aa, Artificial
  helical interface sequence
VGAKILYEAVQG

SEQ ID NO: 20703 - protein, 18 aa, Artificial
  helical interface sequence
TEEFAAVQAKLKTFVASG

SEQ ID NO: 20704 - protein, 18 aa, Artificial
  helical interface sequence
TEEFAAVQAKLKTFVASG

SEQ ID NO: 20705 - protein, 18 aa, Artificial
  helical interface sequence
PYSGTLQAGMAVVHAIID

SEQ ID NO: 20706 - protein, 14 aa, Artificial
  helical interface sequence
FERLHLLGYAYQGL

SEQ ID NO: 20707 - protein, 17 aa, Artificial
  helical interface sequence
HLGEYAGIVQAAHAARG

SEQ ID NO: 20708 - protein, 14 aa, Artificial
  helical interface sequence
FERLHLLGYAYQGL

SEQ ID NO: 20709 - protein, 15 aa, Artificial
  helical interface sequence
MFERHQLLGLAYQGL

SEQ ID NO: 20710 - protein, 6 aa, Artificial
  helical interface sequence
GMSQRV

SEQ ID NO: 20711 - protein, 13 aa, Artificial
  helical interface sequence
IFIVLNMIRETYD

SEQ ID NO: 20712 - protein, 6 aa, Artificial
  helical interface sequence
GMSQRV

SEQ ID NO: 20713 - protein, 6 aa, Artificial
  helical interface sequence
GMSQRV

SEQ ID NO: 20714 - protein, 6 aa, Artificial
  helical interface sequence
GMSQRV

SEQ ID NO: 20715 - protein, 5 aa, Artificial
  helical interface sequence
PRLAH

SEQ ID NO: 20716 - protein, 11 aa, Artificial
  helical interface sequence
KENIIAAAQAG

SEQ ID NO: 20717 - protein, 9 aa, Artificial
  helical interface sequence
EDDITAVLC

SEQ ID NO: 20718 - protein, 9 aa, Artificial
  helical interface sequence
KYKTLRQIR

SEQ ID NO: 20719 - protein, 6 aa, Artificial
  helical interface sequence
IQHLAG

SEQ ID NO: 20720 - protein, 12 aa, Artificial
  helical interface sequence
VDQAREYFTLHY

SEQ ID NO: 20721 - protein, 16 aa, Artificial
  helical interface sequence
PITLMERELVEIFRAL

SEQ ID NO: 20722 - protein, 6 aa, Artificial
  helical interface sequence
EEDLVE

SEQ ID NO: 20723 - protein, 18 aa, Artificial
  helical interface sequence
RRSDLDRFWLETLLCLIG

SEQ ID NO: 20724 - protein, 15 aa, Artificial
  helical interface sequence
ADLLDFWFACTGFRK

SEQ ID NO: 20725 - protein, 7 aa, Artificial
  helical interface sequence
EEYAKYY

SEQ ID NO: 20726 - protein, 11 aa, Artificial
  helical interface sequence
TVALREIRRYQ

SEQ ID NO: 20727 - protein, 5 aa, Artificial
  helical interface sequence
ARAWE

SEQ ID NO: 20728 - protein, 6 aa, Artificial
  helical interface sequence
SEELET

SEQ ID NO: 20729 - protein, 13 aa, Artificial
  helical interface sequence
ILSHLDWVSNVGY

SEQ ID NO: 20730 - protein, 7 aa, Artificial
  helical interface sequence
EIDQITH

SEQ ID NO: 20731 - protein, 26 aa, Artificial
  helical interface sequence
PFHMLSIAFLYGSALLFAMHGATILS

SEQ ID NO: 20732 - protein, 12 aa, Artificial
  helical interface sequence
GNKRLDAVNYIV

SEQ ID NO: 20733 - protein, 12 aa, Artificial
  helical interface sequence
AFSRVISNADAK

SEQ ID NO: 20734 - protein, 22 aa, Artificial
  helical interface sequence
DRVFEMIEEMVIDAKHESKLSN

SEQ ID NO: 20735 - protein, 6 aa, Artificial
  helical interface sequence
SEQLTS

SEQ ID NO: 20736 - protein, 5 aa, Artificial
  helical interface sequence
RSQRA

SEQ ID NO: 20737 - protein, 23 aa, Artificial
  helical interface sequence
EARKNEFLAGRFAAKEAFSKAFG

SEQ ID NO: 20738 - protein, 7 aa, Artificial
  helical interface sequence
DEDAEKI

SEQ ID NO: 20739 - protein, 12 aa, Artificial
  helical interface sequence
PLALECYHNLKM

SEQ ID NO: 20740 - protein, 6 aa, Artificial
  helical interface sequence
SEQLTS

SEQ ID NO: 20741 - protein, 13 aa, Artificial
  helical interface sequence
QLQTELLAALLES

SEQ ID NO: 20742 - protein, 10 aa, Artificial
  helical interface sequence
RVALQAEKLD

SEQ ID NO: 20743 - protein, 13 aa, Artificial
  helical interface sequence
QLQTELLAALLES

SEQ ID NO: 20744 - protein, 10 aa, Artificial
  helical interface sequence
RVALQAEKLD

SEQ ID NO: 20745 - protein, 13 aa, Artificial
  helical interface sequence
NTQIDALLAIVSE

SEQ ID NO: 20746 - protein, 9 aa, Artificial
  helical interface sequence
TIMGRIAKG

SEQ ID NO: 20747 - protein, 10 aa, Artificial
  helical interface sequence
KAHLLSLVDV

SEQ ID NO: 20748 - protein, 13 aa, Artificial
  helical interface sequence
TWASLCANVLIIA

SEQ ID NO: 20749 - protein, 14 aa, Artificial
  helical interface sequence
ANVNAFFGITTMII

SEQ ID NO: 20750 - protein, 6 aa, Artificial
  helical interface sequence
ENDLIS

SEQ ID NO: 20751 - protein, 20 aa, Artificial
  helical interface sequence
PENFKLLGNVLVCVLAHHFG

SEQ ID NO: 20752 - protein, 10 aa, Artificial
  helical interface sequence
PEHAERAAHV

SEQ ID NO: 20753 - protein, 24 aa, Artificial
  helical interface sequence
KGFEKIGNDIQILKSSINIAIEKL

SEQ ID NO: 20754 - protein, 24 aa, Artificial
  helical interface sequence
KGFEKIGNDIQILKSSINIAIEKL

SEQ ID NO: 20755 - protein, 23 aa, Artificial
  helical interface sequence
VKPIEDIQDNLLQALELQLKLNH

SEQ ID NO: 20756 - protein, 21 aa, Artificial
  helical interface sequence
TNICQAADKQLFTLVEWAKRI

SEQ ID NO: 20757 - protein, 22 aa, Artificial
  helical interface sequence
TADAEILINTARIHAQNYLKTY

SEQ ID NO: 20758 - protein, 11 aa, Artificial
  helical interface sequence
FGAHMANPLLR

SEQ ID NO: 20759 - protein, 20 aa, Artificial
  helical interface sequence
AADTQAIADIVQYHLELYTS

SEQ ID NO: 20760 - protein, 11 aa, Artificial
  helical interface sequence
FGAHMANPLLR

SEQ ID NO: 20761 - protein, 15 aa, Artificial
  helical interface sequence
PETFTQLVSSSLYER

SEQ ID NO: 20762 - protein, 23 aa, Artificial
  helical interface sequence
AGDTVQFAEYIQANIQLYSIRED

SEQ ID NO: 20763 - protein, 13 aa, Artificial
  helical interface sequence
VGELFWKVKEEEG

SEQ ID NO: 20764 - protein, 17 aa, Artificial
  helical interface sequence
PQAVSSFVRQELAKSIR

SEQ ID NO: 20765 - protein, 22 aa, Artificial
  helical interface sequence
TADARSMIEHARTAAVTHNLYY

SEQ ID NO: 20766 - protein, 7 aa, Artificial
  helical interface sequence
PDEYEQL

SEQ ID NO: 20767 - protein, 9 aa, Artificial
  helical interface sequence
SLAAMAVLE

SEQ ID NO: 20768 - protein, 11 aa, Artificial
  helical interface sequence
LIMPFLDNQVN

SEQ ID NO: 20769 - protein, 18 aa, Artificial
  helical interface sequence
VQVAEEAIVNAMRVLYYR

SEQ ID NO: 20770 - protein, 12 aa, Artificial
  helical interface sequence
SDQLFGMCESLY

SEQ ID NO: 20771 - protein, 5 aa, Artificial
  helical interface sequence
LESYL

SEQ ID NO: 20772 - protein, 12 aa, Artificial
  helical interface sequence
KYPLLLRELFAL

SEQ ID NO: 20773 - protein, 7 aa, Artificial
  helical interface sequence
VWDQEFL

SEQ ID NO: 20774 - protein, 16 aa, Artificial
  helical interface sequence
KGLLDVTCKTVANMIK

SEQ ID NO: 20775 - protein, 8 aa, Artificial
  helical interface sequence
KRWYRLAS

SEQ ID NO: 20776 - protein, 11 aa, Artificial
  helical interface sequence
PDVTGRLLSQV

SEQ ID NO: 20777 - protein, 10 aa, Artificial
  helical interface sequence
DELLLGIFSC

SEQ ID NO: 20778 - protein, 14 aa, Artificial
  helical interface sequence
AAILKKVIQWCTHH

SEQ ID NO: 20779 - protein, 16 aa, Artificial
  helical interface sequence
KGLLDVTCKTVANMIK

SEQ ID NO: 20780 - protein, 8 aa, Artificial
  helical interface sequence
PEEIRKTF

SEQ ID NO: 20781 - protein, 15 aa, Artificial
  helical interface sequence
RWMSQHNRFVLDCKD

SEQ ID NO: 20782 - protein, 5 aa, Artificial
  helical interface sequence
SDVAD

SEQ ID NO: 20783 - protein, 6 aa, Artificial
  helical interface sequence
WDFAKD

SEQ ID NO: 20784 - protein, 15 aa, Artificial
  helical interface sequence
IPAFADRLGQYVQAH

SEQ ID NO: 20785 - protein, 6 aa, Artificial
  helical interface sequence
PDEYEQ

SEQ ID NO: 20786 - protein, 22 aa, Artificial
  helical interface sequence
TADARSMIEHARTAAVTHNLYY

SEQ ID NO: 20787 - protein, 22 aa, Artificial
  helical interface sequence
NADSRILIEKARVEAQSHRLTL

SEQ ID NO: 20788 - protein, 15 aa, Artificial
  helical interface sequence
VERAGHLLCDKAQKN

SEQ ID NO: 20789 - protein, 15 aa, Artificial
  helical interface sequence
RQSAKAELEKLVDHH

SEQ ID NO: 20790 - protein, 12 aa, Artificial
  helical interface sequence
ILAKTIKRARIL

SEQ ID NO: 20791 - protein, 12 aa, Artificial
  helical interface sequence
GYEFEEFVKRIK

SEQ ID NO: 20792 - protein, 17 aa, Artificial
  helical interface sequence
ASLTKERGRLVDMMTDS

SEQ ID NO: 20793 - protein, 11 aa, Artificial
  helical interface sequence
KFIQRDTLHKG

SEQ ID NO: 20794 - protein, 13 aa, Artificial
  helical interface sequence
LLKSAVELAKDWR

SEQ ID NO: 20795 - protein, 13 aa, Artificial
  helical interface sequence
LLKSAVELAKDWR

SEQ ID NO: 20796 - protein, 13 aa, Artificial
  helical interface sequence
LLKSAVELAKDWR

SEQ ID NO: 20797 - protein, 13 aa, Artificial
  helical interface sequence
LLKSAVELAKDWR

SEQ ID NO: 20798 - protein, 13 aa, Artificial
  helical interface sequence
LLKSAVELAKDWR

SEQ ID NO: 20799 - protein, 7 aa, Artificial
  helical interface sequence
TSSLCYA

SEQ ID NO: 20800 - protein, 11 aa, Artificial
  helical interface sequence
TKELGTVMRSL

SEQ ID NO: 20801 - protein, 14 aa, Artificial
  helical interface sequence
TNYFLNHWLPNLQG

SEQ ID NO: 20802 - protein, 7 aa, Artificial
  helical interface sequence
PGSKSYF

SEQ ID NO: 20803 - protein, 17 aa, Artificial
  helical interface sequence
SFHLLTDCIIVELAYLR

SEQ ID NO: 20804 - protein, 10 aa, Artificial
  helical interface sequence
TGPMDEYLIA

SEQ ID NO: 20805 - protein, 25 aa, Artificial
  helical interface sequence
SRRMAACLRDMEIILRYVTYAVFAG

SEQ ID NO: 20806 - protein, 14 aa, Artificial
  helical interface sequence
SNKRLDVVNRITSN

SEQ ID NO: 20807 - protein, 25 aa, Artificial
  helical interface sequence
SRRMAACLRDMEIILRYVTYAVFAG

SEQ ID NO: 20808 - protein, 5 aa, Artificial
  helical interface sequence
EQYFD

SEQ ID NO: 20809 - protein, 14 aa, Artificial
  helical interface sequence
SIDGKTVLFAALTG

SEQ ID NO: 20810 - protein, 11 aa, Artificial
  helical interface sequence
MNLYRGVKRAS

SEQ ID NO: 20811 - protein, 7 aa, Artificial
  helical interface sequence
YYHVMHD

SEQ ID NO: 20812 - protein, 10 aa, Artificial
  helical interface sequence
EEWDREIENY

SEQ ID NO: 20813 - protein, 14 aa, Artificial
  helical interface sequence
SYGKFIQRDTLAKG

SEQ ID NO: 20814 - protein, 9 aa, Artificial
  helical interface sequence
QAVLSLYAS

SEQ ID NO: 20815 - protein, 9 aa, Artificial
  helical interface sequence
IDTLILDTL

SEQ ID NO: 20816 - protein, 5 aa, Artificial
  helical interface sequence
EDVEE

SEQ ID NO: 20817 - protein, 5 aa, Artificial
  helical interface sequence
LGTGT

SEQ ID NO: 20818 - protein, 5 aa, Artificial
  helical interface sequence
LGTGT

SEQ ID NO: 20819 - protein, 5 aa, Artificial
  helical interface sequence
LGTGT

SEQ ID NO: 20820 - protein, 5 aa, Artificial
  helical interface sequence
LGTGT

SEQ ID NO: 20821 - protein, 12 aa, Artificial
  helical interface sequence
MYDANMVKAAVL

SEQ ID NO: 20822 - protein, 20 aa, Artificial
  helical interface sequence
PVNFKLLSQCIQVVLAVHMG

SEQ ID NO: 20823 - protein, 6 aa, Artificial
  helical interface sequence
EELLKR

SEQ ID NO: 20824 - protein, 8 aa, Artificial
  helical interface sequence
KADVERLR

SEQ ID NO: 20825 - protein, 19 aa, Artificial
  helical interface sequence
EDEVSRAKNQLKSSLLMNL

SEQ ID NO: 20826 - protein, 11 aa, Artificial
  helical interface sequence
QQGIELEIENI

SEQ ID NO: 20827 - protein, 19 aa, Artificial
  helical interface sequence
EDEVSRAKNQLKSSLLMNL

SEQ ID NO: 20828 - protein, 11 aa, Artificial
  helical interface sequence
PEEVFEQVDKI

SEQ ID NO: 20829 - protein, 7 aa, Artificial
  helical interface sequence
QTEKELF

SEQ ID NO: 20830 - protein, 9 aa, Artificial
  helical interface sequence
QYALGIIQA

SEQ ID NO: 20831 - protein, 8 aa, Artificial
  helical interface sequence
RQLCKLLR

SEQ ID NO: 20832 - protein, 8 aa, Artificial
  helical interface sequence
RQLCKLLR

SEQ ID NO: 20833 - protein, 8 aa, Artificial
  helical interface sequence
HADYLLRT

SEQ ID NO: 20834 - protein, 13 aa, Artificial
  helical interface sequence
WFIQSLCAMLKQY

SEQ ID NO: 20835 - protein, 13 aa, Artificial
  helical interface sequence
WFIQSLCAMLKQY

SEQ ID NO: 20836 - protein, 8 aa, Artificial
  helical interface sequence
PEEVRAIS

SEQ ID NO: 20837 - protein, 11 aa, Artificial
  helical interface sequence
EETRAELSQLC

SEQ ID NO: 20838 - protein, 6 aa, Artificial
  helical interface sequence
PVALYL

SEQ ID NO: 20839 - protein, 17 aa, Artificial
  helical interface sequence
KYERARILGTRALQISM

SEQ ID NO: 20840 - protein, 7 aa, Artificial
  helical interface sequence
PQEARLR

SEQ ID NO: 20841 - protein, 12 aa, Artificial
  helical interface sequence
HTLGNLIRAELL

SEQ ID NO: 20842 - protein, 23 aa, Artificial
  helical interface sequence
PEFLEQKRAEVDTVCRHNYEIFD

SEQ ID NO: 20843 - protein, 7 aa, Artificial
  helical interface sequence
EDARLRS

SEQ ID NO: 20844 - protein, 14 aa, Artificial
  helical interface sequence
EGVATYAAAVLFRM

SEQ ID NO: 20845 - protein, 9 aa, Artificial
  helical interface sequence
EEEVEQLVA

SEQ ID NO: 20846 - protein, 21 aa, Artificial
  helical interface sequence
AESKVFYLKMKGDYYRYLAEV

SEQ ID NO: 20847 - protein, 9 aa, Artificial
  helical interface sequence
DVVYALKRQ

SEQ ID NO: 20848 - protein, 10 aa, Artificial
  helical interface sequence
PRHLQLAIRN

SEQ ID NO: 20849 - protein, 7 aa, Artificial
  helical interface sequence
DELNKLL

SEQ ID NO: 20850 - protein, 15 aa, Artificial
  helical interface sequence
AETAEKAFKQYANDN

SEQ ID NO: 20851 - protein, 8 aa, Artificial
  helical interface sequence
EFFRKLSR

SEQ ID NO: 20852 - protein, 21 aa, Artificial
  helical interface sequence
NAPGAAANRVALEACTQARNE

SEQ ID NO: 20853 - protein, 9 aa, Artificial
  helical interface sequence
IQVERDKLN

SEQ ID NO: 20854 - protein, 10 aa, Artificial
  helical interface sequence
LDEFRFGIEQ

SEQ ID NO: 20855 - protein, 23 aa, Artificial
  helical interface sequence
GPDYRVLVHRARKLAQQYYLVYQ

SEQ ID NO: 20856 - protein, 15 aa, Artificial
  helical interface sequence
TGAIAAMLSTILYSR

SEQ ID NO: 20857 - protein, 8 aa, Artificial
  helical interface sequence
YGYVDATY

SEQ ID NO: 20858 - protein, 22 aa, Artificial
  helical interface sequence
AGDTVQFAEYIQKNVQLYKMRN

SEQ ID NO: 20859 - protein, 15 aa, Artificial
  helical interface sequence
TAQLVQRVASVMQEY

SEQ ID NO: 20860 - protein, 22 aa, Artificial
  helical interface sequence
ATDVQTVAQRLKFRLNLYELKE

SEQ ID NO: 20861 - protein, 15 aa, Artificial
  helical interface sequence
TGAIAAMLSTILYSR

SEQ ID NO: 20862 - protein, 12 aa, Artificial
  helical interface sequence
VSRLVSLIGSKT

SEQ ID NO: 20863 - protein, 6 aa, Artificial
  helical interface sequence
MSEFME

SEQ ID NO: 20864 - protein, 8 aa, Artificial
  helical interface sequence
YGYVDATY

SEQ ID NO: 20865 - protein, 19 aa, Artificial
  helical interface sequence
QTEARDLVERCMRVLYYRD

SEQ ID NO: 20866 - protein, 11 aa, Artificial
  helical interface sequence
SLAAMAVFEDK

SEQ ID NO: 20867 - protein, 22 aa, Artificial
  helical interface sequence
AGDTVQFAEYIQKNVQLYKMRN

SEQ ID NO: 20868 - protein, 6 aa, Artificial
  helical interface sequence
DEEYRE

SEQ ID NO: 20869 - protein, 19 aa, Artificial
  helical interface sequence
FLDLIQEGNQGLIRAVEKF

SEQ ID NO: 20870 - protein, 12 aa, Artificial
  helical interface sequence
AKRVEETLKIAQ

SEQ ID NO: 20871 - protein, 14 aa, Artificial
  helical interface sequence
KREVEVLRRAEKLG

SEQ ID NO: 20872 - protein, 17 aa, Artificial
  helical interface sequence
LGQILETHLGLAGYFLG

SEQ ID NO: 20873 - protein, 15 aa, Artificial
  helical interface sequence
QKTLKAIEEARKEAV

SEQ ID NO: 20874 - protein, 8 aa, Artificial
  helical interface sequence
VKAARRML

SEQ ID NO: 20875 - protein, 19 aa, Artificial
  helical interface sequence
VDAATQSLLSEELEKALSK

SEQ ID NO: 20876 - protein, 18 aa, Artificial
  helical interface sequence
WRERYLFTMEAVNKASAA

SEQ ID NO: 20877 - protein, 18 aa, Artificial
  helical interface sequence
WRERYLFTMEAVNKASAA

SEQ ID NO: 20878 - protein, 15 aa, Artificial
  helical interface sequence
PAAVLFEINACRKAR

SEQ ID NO: 20879 - protein, 15 aa, Artificial
  helical interface sequence
PAAVLFEINACRKAR

SEQ ID NO: 20880 - protein, 21 aa, Artificial
  helical interface sequence
IQAGATANRVALEAMILARNE

SEQ ID NO: 20881 - protein, 18 aa, Artificial
  helical interface sequence
WRERYLFTMEAVNKASAA

SEQ ID NO: 20882 - protein, 12 aa, Artificial
  helical interface sequence
VSFMAWDAANLS

SEQ ID NO: 20883 - protein, 13 aa, Artificial
  helical interface sequence
RQTLEYQAQIAEQ

SEQ ID NO: 20884 - protein, 10 aa, Artificial
  helical interface sequence
EATELELGMR

SEQ ID NO: 20885 - protein, 12 aa, Artificial
  helical interface sequence
WADAENFCTQQH

SEQ ID NO: 20886 - protein, 8 aa, Artificial
  helical interface sequence
SLYLTKSS

SEQ ID NO: 20887 - protein, 9 aa, Artificial
  helical interface sequence
LHFFLAAWR

SEQ ID NO: 20888 - protein, 8 aa, Artificial
  helical interface sequence
YDEFLEFM

SEQ ID NO: 20889 - protein, 46 aa, Artificial; identical to SEQ ID NO: 137
  helical interface sequence

SEQ ID NO: 20890 - protein, 11 aa, Artificial
  helical interface sequence
TKELGKVMRML

SEQ ID NO: 20891 - protein, 12 aa, Artificial
  helical interface sequence
TKELGKVMRMLN

SEQ ID NO: 20892 - protein, 10 aa, Artificial
  helical interface sequence
WADAENFCTQ

SEQ ID NO: 20893 - protein, 22 aa, Artificial
  helical interface sequence
AQGALANIAVDKANLEIMTKRS

SEQ ID NO: 20894 - protein, 5 aa, Artificial
  helical interface sequence
QGILN

SEQ ID NO: 20895 - protein, 5 aa, Artificial
  helical interface sequence
SQVIG

SEQ ID NO: 20896 - protein, 31 aa, Artificial
  helical interface sequence
IIQGRAVGVAHYLLGGIATTWAFFLARIISV

SEQ ID NO: 20897 - protein, 31 aa, Artificial
  helical interface sequence
IVQARLVGLAHFSVGYILTYAAFLIASTAAK

SEQ ID NO: 20898 - protein, 14 aa, Artificial
  helical interface sequence
TTSFGHLLAAGVVS

SEQ ID NO: 20899 - protein, 17 aa, Artificial
  helical interface sequence
RGYWQELIETLVWAHER

SEQ ID NO: 20900 - protein, 28 aa, Artificial
  helical interface sequence
SEGWSQFTAGFFVGAMGSAFVAFFLLEN

SEQ ID NO: 20901 - protein, 10 aa, Artificial
  helical interface sequence
IEWLQKLMRS

SEQ ID NO: 20902 - protein, 15 aa, Artificial
  helical interface sequence
RQSAKAELEKLVDHH

SEQ ID NO: 20903 - protein, 22 aa, Artificial
  helical interface sequence
TADAEILINTARIHAQNYLKTY

SEQ ID NO: 20904 - protein, 18 aa, Artificial
  helical interface sequence
GPDYRVLVDKSRKVAHTS

SEQ ID NO: 20905 - protein, 17 aa, Artificial
  helical interface sequence
PQAVSSFVRQELAKSIR

SEQ ID NO: 20906 - protein, 22 aa, Artificial
  helical interface sequence
TADARSMIEHARTAAVTHNLYY

SEQ ID NO: 20907 - protein, 18 aa, Artificial
  helical interface sequence
PEDLFETISQALLNAADR

SEQ ID NO: 20908 - protein, 22 aa, Artificial
  helical interface sequence
AADTQAIADIVQYHLELYTSQY

SEQ ID NO: 20909 - protein, 19 aa, Artificial
  helical interface sequence
VEEVIKLVRDSFTSATERH

SEQ ID NO: 20910 - protein, 14 aa, Artificial
  helical interface sequence
FGAHMANPLLRKVV

SEQ ID NO: 20911 - protein, 12 aa, Artificial
  helical interface sequence
SDQLFGMCESLY

SEQ ID NO: 20912 - protein, 6 aa, Artificial
  helical interface sequence
PDEYEQ

SEQ ID NO: 20913 - protein, 19 aa, Artificial
  helical interface sequence
VQVAEEAIVNAMRVLYYRD

SEQ ID NO: 20914 - protein, 21 aa, Artificial
  helical interface sequence
IPDGRHLVNRGREEAASFKKL

SEQ ID NO: 20915 - protein, 17 aa, Artificial
  helical interface sequence
NCYFTLEGVHEVFQEEG

SEQ ID NO: 20916 - protein, 7 aa, Artificial
  helical interface sequence
KEETEEL

SEQ ID NO: 20917 - protein, 6 aa, Artificial
  helical interface sequence
TSHLKQ

SEQ ID NO: 20918 - protein, 21 aa, Artificial
  helical interface sequence
PESLRSKVDEAVAVLQAHQAK

SEQ ID NO: 20919 - protein, 12 aa, Artificial
  helical interface sequence
PLSIALAMGMME

SEQ ID NO: 20920 - protein, 22 aa, Artificial
  helical interface sequence
PQGGLQNIATGKHNLEILTKRS

SEQ ID NO: 20921 - protein, 17 aa, Artificial
  helical interface sequence
EHAIANFTKAEMALEFN

SEQ ID NO: 20922 - protein, 19 aa, Artificial
  helical interface sequence
LDTKLDQYWTALNLMIDSS

SEQ ID NO: 20923 - protein, 5 aa, Artificial
  helical interface sequence
PAELI

SEQ ID NO: 20924 - protein, 5 aa, Artificial
  helical interface sequence
APIVL

SEQ ID NO: 20925 - protein, 15 aa, Artificial
  helical interface sequence
AKEWEHLVNFHLGQW

SEQ ID NO: 20926 - protein, 16 aa, Artificial
  helical interface sequence
PWQGLVRLQKIMDEYA

SEQ ID NO: 20927 - protein, 5 aa, Artificial
  helical interface sequence
SCVKM

SEQ ID NO: 20928 - protein, 8 aa, Artificial
  helical interface sequence
RETAASLL

SEQ ID NO: 20929 - protein, 17 aa, Artificial
  helical interface sequence
QRLVQNCLWTLRNLSDA

SEQ ID NO: 20930 - protein, 9 aa, Artificial
  helical interface sequence
WNAIFSLCQ

SEQ ID NO: 20931 - protein, 13 aa, Artificial
  helical interface sequence
EHVLTALANGLSL

SEQ ID NO: 20932 - protein, 15 aa, Artificial
  helical interface sequence
TLQRELLLLVNLKRQ

SEQ ID NO: 20933 - protein, 19 aa, Artificial
  helical interface sequence
PALDIGQIEGAYVQGAGWL

SEQ ID NO: 20934 - protein, 6 aa, Artificial
  helical interface sequence
VAWRNR

SEQ ID NO: 20935 - protein, 14 aa, Artificial
  helical interface sequence
EVGGEALGRLLVVY

SEQ ID NO: 20936 - protein, 19 aa, Artificial
  helical interface sequence
PENFRLLGNVLVCVLAHHF

SEQ ID NO: 20937 - protein, 18 aa, Artificial
  helical interface sequence
AHAGEYGAEALERMFLSF

SEQ ID NO: 20938 - protein, 9 aa, Artificial
  helical interface sequence
TECVKAADE

SEQ ID NO: 20939 - protein, 15 aa, Artificial
  helical interface sequence
QAHQDIIANIGEKLG

SEQ ID NO: 20940 - protein, 9 aa, Artificial
  helical interface sequence
ALHLAAILG

SEQ ID NO: 20941 - protein, 26 aa, Artificial
  helical interface sequence
AEVRIFHCCQCTSVETVTELTEFAKA

SEQ ID NO: 20942 - protein, 11 aa, Artificial
  helical interface sequence
LQDCATHTQPF

SEQ ID NO: 20943 - protein, 10 aa, Artificial
  helical interface sequence
PAQMAKYHQF

SEQ ID NO: 20944 - protein, 6 aa, Artificial
  helical interface sequence
PQFGLN

SEQ ID NO: 20945 - protein, 7 aa, Artificial
  helical interface sequence
LEPVQFL

SEQ ID NO: 20946 - protein, 47 aa, Artificial; identical to SEQ ID NO: 146
  helical interface sequence

SEQ ID NO: 20947 - protein, 23 aa, Artificial
  helical interface sequence
GKWVFYGLAAILTVVTLIGVVTI

SEQ ID NO: 20948 - protein, 13 aa, Artificial
  helical interface sequence
TGFHMLHTLFQTS

SEQ ID NO: 20949 - protein, 13 aa, Artificial
  helical interface sequence
LLDALGYIKDNLA

SEQ ID NO: 20950 - protein, 21 aa, Artificial
  helical interface sequence
PAAAIQQGKVESSKDFLIATL

SEQ ID NO: 20951 - protein, 37 aa, Artificial; identical to SEQ ID NO: 8364
  helical interface sequence

SEQ ID NO: 20952 - protein, 36 aa, Artificial
  helical interface sequence
HSHLKHALEKAEELCSQVNEGVREKENSDRLEWIQA

SEQ ID NO: 20953 - protein, 39 aa, Artificial; identical to SEQ ID NO: 1499
  helical interface sequence

SEQ ID NO: 20954 - protein, 15 aa, Artificial
  helical interface sequence
LKIRVRVADVEIKHK

SEQ ID NO: 20955 - protein, 15 aa, Artificial
  helical interface sequence
QIAELMWHRMQEWRN

SEQ ID NO: 20956 - protein, 8 aa, Artificial
  helical interface sequence
KLFLEMLE

SEQ ID NO: 20957 - protein, 9 aa, Artificial
  helical interface sequence
KILHRLLQE

SEQ ID NO: 20958 - protein, 12 aa, Artificial
  helical interface sequence
AIYVYKVLKQVH

SEQ ID NO: 20959 - protein, 12 aa, Artificial
  helical interface sequence
ALKLVRESELLG

SEQ ID NO: 20960 - protein, 14 aa, Artificial
  helical interface sequence
KLLGVITMFAAILV

SEQ ID NO: 20961 - protein, 11 aa, Artificial
  helical interface sequence
LGEAFKKIDAI

SEQ ID NO: 20962 - protein, 20 aa, Artificial
  helical interface sequence
NFEATKKSVLKQVQDFEDND

SEQ ID NO: 20963 - protein, 5 aa, Artificial
  helical interface sequence
LESLE

SEQ ID NO: 20964 - protein, 19 aa, Artificial
  helical interface sequence
PSSFENVKEKWVPEITHHC

SEQ ID NO: 20965 - protein, 23 aa, Artificial
  helical interface sequence
MDELTEIKTVVSEAVTNAIIHGY

SEQ ID NO: 20966 - protein, 15 aa, Artificial
  helical interface sequence
ESFARVTVAAFVAQL

SEQ ID NO: 20967 - protein, 22 aa, Artificial
  helical interface sequence
PEKRKLIQQQLVLLLHAHKCQR

SEQ ID NO: 20968 - protein, 18 aa, Artificial
  helical interface sequence
LLEEDKICGYVAGGLMYA

SEQ ID NO: 20969 - protein, 12 aa, Artificial
  helical interface sequence
VTLTGGIGILLS

SEQ ID NO: 20970 - protein, 24 aa, Artificial
  helical interface sequence
MEEFQIYEKYCQNKPRSESLWRQC

SEQ ID NO: 20971 - protein, 12 aa, Artificial
  helical interface sequence
KYQLLLKEMLKY

SEQ ID NO: 20972 - protein, 14 aa, Artificial
  helical interface sequence
KGLLDVTCKTVANM

SEQ ID NO: 20973 - protein, 16 aa, Artificial
  helical interface sequence
HEAVVKEAGDACFSKY

SEQ ID NO: 20974 - protein, 33 aa, Artificial; identical to SEQ ID NO: 12931
  helical interface sequence

SEQ ID NO: 20975 - protein, 5 aa, Artificial
  helical interface sequence
TEEIM

SEQ ID NO: 20976 - protein, 33 aa, Artificial; identical to SEQ ID NO: 12931
  helical interface sequence

SEQ ID NO: 20977 - protein, 17 aa, Artificial
  helical interface sequence
PHSGDVLYELLQHILKQ

SEQ ID NO: 20978 - protein, 9 aa, Artificial
  helical interface sequence
ELGRPDAEY

SEQ ID NO: 20979 - protein, 10 aa, Artificial
  helical interface sequence
VDTYCRHNYG

SEQ ID NO: 20980 - protein, 13 aa, Artificial
  helical interface sequence
NKELSVAGREIVT

SEQ ID NO: 20981 - protein, 8 aa, Artificial
  helical interface sequence
LTEIKKQI

SEQ ID NO: 20982 - protein, 18 aa, Artificial
  helical interface sequence
QEKKRKISIFRGIQAYNE

SEQ ID NO: 20983 - protein, 15 aa, Artificial
  helical interface sequence
VKIRIESTVAGSLRS

SEQ ID NO: 20984 - protein, 21 aa, Artificial
  helical interface sequence
QVSQILRVEVDIDVALRACKG

SEQ ID NO: 20985 - protein, 16 aa, Artificial
  helical interface sequence
RSMKSVLEHLRAKMQR

SEQ ID NO: 20986 - protein, 8 aa, Artificial
  helical interface sequence
LEEVRILE

SEQ ID NO: 20987 - protein, 7 aa, Artificial
  helical interface sequence
IRIESTV

SEQ ID NO: 20988 - protein, 37 aa, Artificial; identical to SEQ ID NO: 622
  helical interface sequence

SEQ ID NO: 20989 - protein, 8 aa, Artificial
  helical interface sequence
LEEVRILE

SEQ ID NO: 20990 - protein, 7 aa, Artificial
  helical interface sequence
WVQYKEG

SEQ ID NO: 20991 - protein, 5 aa, Artificial
  helical interface sequence
YRLTT

SEQ ID NO: 20992 - protein, 14 aa, Artificial
  helical interface sequence
SYGKFIQRDTLHKG

SEQ ID NO: 20993 - protein, 16 aa, Artificial
  helical interface sequence
FDGFAIFARDMDMTLN

SEQ ID NO: 20994 - protein, 8 aa, Artificial
  helical interface sequence
KTTLLHML

SEQ ID NO: 20995 - protein, 11 aa, Artificial
  helical interface sequence
VGDLRYMLTGL

SEQ ID NO: 20996 - protein, 10 aa, Artificial
  helical interface sequence
DAEVDELLKG

SEQ ID NO: 20997 - protein, 10 aa, Artificial
  helical interface sequence
YKKFIEDVLR

SEQ ID NO: 20998 - protein, 7 aa, Artificial
  helical interface sequence
STDLAIF

SEQ ID NO: 20999 - protein, 13 aa, Artificial
  helical interface sequence
EIKRLGKRFKKLD

SEQ ID NO: 21000 - protein, 9 aa, Artificial
  helical interface sequence
EDFVEGLRV

SEQ ID NO: 21001 - protein, 7 aa, Artificial
  helical interface sequence
RHLTEYF

SEQ ID NO: 21002 - protein, 5 aa, Artificial
  helical interface sequence
DEQLK

SEQ ID NO: 21003 - protein, 6 aa, Artificial
  helical interface sequence
DEQLKS

SEQ ID NO: 21004 - protein, 14 aa, Artificial
  helical interface sequence
LGDLPPILNRKRAQ

SEQ ID NO: 21005 - protein, 5 aa, Artificial
  helical interface sequence
IFEQY

SEQ ID NO: 21006 - protein, 30 aa, Artificial
  helical interface sequence
LTPFFINQAQTYFQIAKQGVQDLYYNCLGD

SEQ ID NO: 21007 - protein, 7 aa, Artificial
  helical interface sequence
PETHTSL

SEQ ID NO: 21008 - protein, 7 aa, Artificial
  helical interface sequence
ATLMQAL

SEQ ID NO: 21009 - protein, 10 aa, Artificial
  helical interface sequence
SAIPEGQFMD

SEQ ID NO: 21010 - protein, 12 aa, Artificial
  helical interface sequence
FTVFLTMFGEKL

SEQ ID NO: 21011 - protein, 28 aa, Artificial
  helical interface sequence
EYWERETQKAKGNEQSFRVSLRTLLGYY

SEQ ID NO: 21012 - protein, 14 aa, Artificial
  helical interface sequence
FPEFLTMMARKMKD

SEQ ID NO: 21013 - protein, 13 aa, Artificial
  helical interface sequence
SEEEIREAFRVFD

SEQ ID NO: 21014 - protein, 12 aa, Artificial
  helical interface sequence
TRANKDIFTLFD

SEQ ID NO: 21015 - protein, 8 aa, Artificial
  helical interface sequence
KTNILQYA

SEQ ID NO: 21016 - protein, 18 aa, Artificial
  helical interface sequence
LVDMKRLEVDIDIKIRSC

SEQ ID NO: 21017 - protein, 7 aa, Artificial
  helical interface sequence
GVLVNNR

SEQ ID NO: 21018 - protein, 15 aa, Artificial
  helical interface sequence
EDLKRRLADSVQRTF

SEQ ID NO: 21019 - protein, 15 aa, Artificial
  helical interface sequence
EDLKRRLADSVQRTF

SEQ ID NO: 21020 - protein, 30 aa, Artificial
  helical interface sequence
FFVKFIMWGILTALAYHVVVGIRHMMMDFG

SEQ ID NO: 21021 - protein, 9 aa, Artificial
  helical interface sequence
FEDIINSLG

SEQ ID NO: 21022 - protein, 7 aa, Artificial
  helical interface sequence
KAYKPMC

SEQ ID NO: 21023 - protein, 6 aa, Artificial
  helical interface sequence
DEQLKS

SEQ ID NO: 21024 - protein, 6 aa, Artificial
  helical interface sequence
DEQLKS

SEQ ID NO: 21025 - protein, 11 aa, Artificial
  helical interface sequence
KKIENTMLENI

SEQ ID NO: 21026 - protein, 28 aa, Artificial
  helical interface sequence
LRESFEDNVVRFLNEARDKAGRLAEVNL

SEQ ID NO: 21027 - protein, 6 aa, Artificial
  helical interface sequence
YEEFVQ

SEQ ID NO: 21028 - protein, 6 aa, Artificial
  helical interface sequence
YEEFVQ

SEQ ID NO: 21029 - protein, 7 aa, Artificial
  helical interface sequence
AAELRHV

SEQ ID NO: 21030 - protein, 6 aa, Artificial
  helical interface sequence
YEEFVQ

SEQ ID NO: 21031 - protein, 6 aa, Artificial
  helical interface sequence
SEQLTS

SEQ ID NO: 21032 - protein, 19 aa, Artificial
  helical interface sequence
RWEVAALQPQLRIDKAVAL

SEQ ID NO: 21033 - protein, 20 aa, Artificial
  helical interface sequence
ENLYDDRVFRIKRALDLSMR

SEQ ID NO: 21034 - protein, 33 aa, Artificial; identical to SEQ ID NO: 3637
  helical interface sequence

SEQ ID NO: 21035 - protein, 23 aa, Artificial
  helical interface sequence
TEELLDFLHARDHCVAHKLFNSL

SEQ ID NO: 21036 - protein, 23 aa, Artificial
  helical interface sequence
ERIEKEMIKDLESIIEDFFIETG

SEQ ID NO: 21037 - protein, 23 aa, Artificial
  helical interface sequence
DWYLKGRLTSLESQFINALGILE

SEQ ID NO: 21038 - protein, 12 aa, Artificial
  helical interface sequence
EEEIREAFRVFD

SEQ ID NO: 21039 - protein, 7 aa, Artificial
  helical interface sequence
YSLARIV

SEQ ID NO: 21040 - protein, 7 aa, Artificial
  helical interface sequence
YSLARIV

SEQ ID NO: 21041 - protein, 9 aa, Artificial
  helical interface sequence
QAVLSLYAS

SEQ ID NO: 21042 - protein, 5 aa, Artificial
  helical interface sequence
YDEHL

SEQ ID NO: 21043 - protein, 10 aa, Artificial
  helical interface sequence
DFKEAFLLFD

SEQ ID NO: 21044 - protein, 13 aa, Artificial
  helical interface sequence
SDNLKTEMDEYIR

SEQ ID NO: 21045 - protein, 22 aa, Artificial
  helical interface sequence
ETEKRPFIDEAKRLRALHMKEH

SEQ ID NO: 21046 - protein, 9 aa, Artificial
  helical interface sequence
YASSLASKT

SEQ ID NO: 21047 - protein, 17 aa, Artificial
  helical interface sequence
EWDDFSLEEAMKIKESS

SEQ ID NO: 21048 - protein, 28 aa, Artificial
  helical interface sequence
DTWAKIHFAIMFVGVNMTFFPQHFLGLS

SEQ ID NO: 21049 - protein, 28 aa, Artificial
  helical interface sequence
EWKTVVGAAMFFIGFTALLLIWEKHYVY

SEQ ID NO: 21050 - protein, 28 aa, Artificial
  helical interface sequence
EWKTVVGAAMFFIGFTALLLIWEKHYVY

SEQ ID NO: 21051 - protein, 13 aa, Artificial
  helical interface sequence
ISWVSTWDDRRAE

SEQ ID NO: 21052 - protein, 28 aa, Artificial
  helical interface sequence
KWRLLAMMTLFFGSGFAAPFFIVRHQLL

SEQ ID NO: 21053 - protein, 28 aa, Artificial
  helical interface sequence
DTWAKIHFAIMFVGVNMTFFPQHFLGLS

SEQ ID NO: 21054 - protein, 28 aa, Artificial
  helical interface sequence
EWKTVVGAAMFFIGFTALLLIWEKHYVY

SEQ ID NO: 21055 - protein, 28 aa, Artificial
  helical interface sequence
KWRLLAMMTLFFGSGFAAPFFIVRHQLL

SEQ ID NO: 21056 - protein, 12 aa, Artificial
  helical interface sequence
DQSQEGFAKLLG

SEQ ID NO: 21057 - protein, 8 aa, Artificial
  helical interface sequence
VYMLELET

SEQ ID NO: 21058 - protein, 7 aa, Artificial
  helical interface sequence
LLGEILN

SEQ ID NO: 21059 - protein, 14 aa, Artificial
  helical interface sequence
EEQRNAKIKSIRDD

SEQ ID NO: 21060 - protein, 19 aa, Artificial
  helical interface sequence
CLRTICECDRVAANCFHQN

SEQ ID NO: 21061 - protein, 13 aa, Artificial
  helical interface sequence
LFQFARMINGKLG

SEQ ID NO: 21062 - protein, 16 aa, Artificial
  helical interface sequence
ATDRCCFVHDCCYGGV

SEQ ID NO: 21063 - protein, 13 aa, Artificial
  helical interface sequence
LFQFARMINGKLG

SEQ ID NO: 21064 - protein, 13 aa, Artificial
  helical interface sequence
EDLRMAITLRELD

SEQ ID NO: 21065 - protein, 9 aa, Artificial
  helical interface sequence
SELLNELAH

SEQ ID NO: 21066 - protein, 8 aa, Artificial
  helical interface sequence
PLLCEIWD

SEQ ID NO: 21067 - protein, 11 aa, Artificial
  helical interface sequence
ISAFSCIAALA

SEQ ID NO: 21068 - protein, 12 aa, Artificial
  helical interface sequence
LISALVRAHVDS

SEQ ID NO: 21069 - protein, 12 aa, Artificial
  helical interface sequence
LISALVRAHVDS

SEQ ID NO: 21070 - protein, 6 aa, Artificial
  helical interface sequence
PDSLEN

SEQ ID NO: 21071 - protein, 27 aa, Artificial
  helical interface sequence
EYVPMVKEVGLALRTLLATVDETIPLL

SEQ ID NO: 21072 - protein, 5 aa, Artificial
  helical interface sequence
KSIIN

SEQ ID NO: 21073 - protein, 10 aa, Artificial
  helical interface sequence
WTILNEIISM

SEQ ID NO: 21074 - protein, 26 aa, Artificial
  helical interface sequence
FSKGLIIQFIDQAQTTFAQMQRQLDG

SEQ ID NO: 21075 - protein, 13 aa, Artificial
  helical interface sequence
TAMKQAVDNAYAR

SEQ ID NO: 21076 - protein, 15 aa, Artificial
  helical interface sequence
KSVMEELKRIIDDSE

SEQ ID NO: 21077 - protein, 10 aa, Artificial
  helical interface sequence
HLENEVARLK

SEQ ID NO: 21078 - protein, 28 aa, Artificial
  helical interface sequence
RDARQQRFAHFTELAIISVQEIVDFAKQ

SEQ ID NO: 21079 - protein, 28 aa, Artificial
  helical interface sequence
QWLQDMTTHLILRSFKEFLQSSLRALRQ

SEQ ID NO: 21080 - protein, 13 aa, Artificial
  helical interface sequence
EALATLVVNTMRG

SEQ ID NO: 21081 - protein, 13 aa, Artificial
  helical interface sequence
IREMLPVLEAVAK

SEQ ID NO: 21082 - protein, 28 aa, Artificial
  helical interface sequence
PELGPTLDTLQLDVADFATTIWQQMEEL

SEQ ID NO: 21083 - protein, 5 aa, Artificial
  helical interface sequence
IESFF

SEQ ID NO: 21084 - protein, 5 aa, Artificial
  helical interface sequence
MDMYR

SEQ ID NO: 21085 - protein, 23 aa, Artificial
  helical interface sequence
VADARVLVDFARISAQQEKVTYG

SEQ ID NO: 21086 - protein, 23 aa, Artificial
  helical interface sequence
VADARVLVDFARISAQQEKVTYG

SEQ ID NO: 21087 - protein, 23 aa, Artificial
  helical interface sequence
VADARVLVDFARISAQQEKVTYG

SEQ ID NO: 21088 - protein, 18 aa, Artificial
  helical interface sequence
PYAAQLAALDAAKKAMAY

SEQ ID NO: 21089 - protein, 8 aa, Artificial
  helical interface sequence
DVDIAEAA

SEQ ID NO: 21090 - protein, 7 aa, Artificial
  helical interface sequence
DEEIRRD

SEQ ID NO: 21091 - protein, 7 aa, Artificial
  helical interface sequence
SEQLTSG

SEQ ID NO: 21092 - protein, 7 aa, Artificial
  helical interface sequence
WWQWWVK

SEQ ID NO: 21093 - protein, 7 aa, Artificial
  helical interface sequence
WYVWGQN

SEQ ID NO: 21094 - protein, 22 aa, Artificial
  helical interface sequence
RRYTEVYLEHRMQEAVEAERAG

SEQ ID NO: 21095 - protein, 14 aa, Artificial
  helical interface sequence
YDALRRLLYMIYMS

SEQ ID NO: 21096 - protein, 8 aa, Artificial
  helical interface sequence
VYMLELET

SEQ ID NO: 21097 - protein, 5 aa, Artificial
  helical interface sequence
VCSET

SEQ ID NO: 21098 - protein, 22 aa, Artificial
  helical interface sequence
YNEFENLRRAGIVHADMRGYSY

SEQ ID NO: 21099 - protein, 15 aa, Artificial
  helical interface sequence
LKIRVRVADVEIKHK

SEQ ID NO: 21100 - protein, 22 aa, Artificial
  helical interface sequence
CIGGITFTCFLVQVATGFAMTF

SEQ ID NO: 21101 - protein, 25 aa, Artificial
  helical interface sequence
NDLLYMFPVVILGTFACVIGLSVLD

SEQ ID NO: 21102 - protein, 9 aa, Artificial
  helical interface sequence
SVLEDRCLN

SEQ ID NO: 21103 - protein, 11 aa, Artificial
  helical interface sequence
PAVLSQIIELE

SEQ ID NO: 21104 - protein, 49 aa, Artificial
  helical interface sequence
AHRVLPVLVSARRISEEMAKLKQKTEQLQDRIAGQARINQAKVLLMQRH

SEQ ID NO: 21105 - protein, 20 aa, Artificial
  helical interface sequence
PENFRLLGNVIVVVLARRLG

SEQ ID NO: 21106 - protein, 12 aa, Artificial
  helical interface sequence
DEEVDEMIREAD

SEQ ID NO: 21107 - protein, 5 aa, Artificial
  helical interface sequence
ISQLL

SEQ ID NO: 21108 - protein, 6 aa, Artificial
  helical interface sequence
LIEMCQ

SEQ ID NO: 21109 - protein, 7 aa, Artificial
  helical interface sequence
SEQLTSG

SEQ ID NO: 21110 - protein, 7 aa, Artificial
  helical interface sequence
GLFYSIF

SEQ ID NO: 21111 - protein, 6 aa, Artificial
  helical interface sequence
TSIRPY

SEQ ID NO: 21112 - protein, 12 aa, Artificial
  helical interface sequence
TKTMAKVITTVL

SEQ ID NO: 21113 - protein, 22 aa, Artificial
  helical interface sequence
NYQVEEDIGKLKSCLTGFLQEY

SEQ ID NO: 21114 - protein, 32 aa, Artificial; identical to SEQ ID NO: 1328
  helical interface sequence

SEQ ID NO: 21115 - protein, 13 aa, Artificial
  helical interface sequence
VERIKERVEEKEG

SEQ ID NO: 21116 - protein, 32 aa, Artificial; identical to SEQ ID NO: 1328
  helical interface sequence

SEQ ID NO: 21117 - protein, 13 aa, Artificial
  helical interface sequence
WNLQPLLQSAQLT

SEQ ID NO: 21118 - protein, 13 aa, Artificial
  helical interface sequence
WNLQSLLLSAQIT

SEQ ID NO: 21119 - protein, 11 aa, Artificial
  helical interface sequence
QSLLLSAQITG

SEQ ID NO: 21120 - protein, 23 aa, Artificial
  helical interface sequence
AQGALANIAVDKANLDVMKERSN

SEQ ID NO: 21121 - protein, 28 aa, Artificial
  helical interface sequence
PEFLEQKRAEVDTVCRHNYEIFDNFLVP

SEQ ID NO: 21122 - protein, 28 aa, Artificial
  helical interface sequence
PEFLEQKRAEVDTVCRHNYEIFDNFLVP

SEQ ID NO: 21123 - protein, 15 aa, Artificial
  helical interface sequence
CEDMMKRAVFARELG

SEQ ID NO: 21124 - protein, 29 aa, Artificial
  helical interface sequence
RRIENLNKKVDDGFLDIWTYNAELLVLLE

SEQ ID NO: 21125 - protein, 7 aa, Artificial
  helical interface sequence
RFAKLLL

SEQ ID NO: 21126 - protein, 28 aa, Artificial
  helical interface sequence
PLLAFLVIIQIAFGSIILIYLDEIVSKY

SEQ ID NO: 21127 - protein, 6 aa, Artificial
  helical interface sequence
DEQLKS

SEQ ID NO: 21128 - protein, 9 aa, Artificial
  helical interface sequence
QSGVGALFN

SEQ ID NO: 21129 - protein, 14 aa, Artificial
  helical interface sequence
AKNYGRAVYECLRG

SEQ ID NO: 21130 - protein, 19 aa, Artificial
  helical interface sequence
EDDSKLASRKYARIIQKIG

SEQ ID NO: 21131 - protein, 8 aa, Artificial
  helical interface sequence
RDEIKAAL

SEQ ID NO: 21132 - protein, 21 aa, Artificial
  helical interface sequence
PKRAEAYIKLRIKGAIYDYLR

SEQ ID NO: 21133 - protein, 14 aa, Artificial
  helical interface sequence
EREKLVIQLIFYEE

SEQ ID NO: 21134 - protein, 15 aa, Artificial
  helical interface sequence
RQLRSSIERVISIFQ

SEQ ID NO: 21135 - protein, 18 aa, Artificial
  helical interface sequence
VNDIQKLVGKLNWASQIY

SEQ ID NO: 21136 - protein, 9 aa, Artificial
  helical interface sequence
NECMESVRN

SEQ ID NO: 21137 - protein, 53 aa, Artificial; identical to SEQ ID NO: 171
  helical interface sequence

SEQ ID NO: 21138 - protein, 53 aa, Artificial; identical to SEQ ID NO: 171
  helical interface sequence

SEQ ID NO: 21139 - protein, 22 aa, Artificial
  helical interface sequence
QKSTQNAINGITNKVNSVIEKM

SEQ ID NO: 21140 - protein, 22 aa, Artificial
  helical interface sequence
QKSTQNAINGITNKVNSVIEKM

SEQ ID NO: 21141 - protein, 52 aa, Artificial; identical to SEQ ID NO: 1225
  helical interface sequence

SEQ ID NO: 21142 - protein, 53 aa, Artificial; identical to SEQ ID NO: 171
  helical interface sequence

SEQ ID NO: 21143 - protein, 22 aa, Artificial
  helical interface sequence
QKSTQNAINGITNKVNSVIEKM

SEQ ID NO: 21144 - protein, 9 aa, Artificial
  helical interface sequence
NECMESVRN

SEQ ID NO: 21145 - protein, 50 aa, Artificial; identical to SEQ ID NO: 605
  helical interface sequence

SEQ ID NO: 21146 - protein, 22 aa, Artificial
  helical interface sequence
QKSTQNAIDGITNKVNSVIEKM

SEQ ID NO: 21147 - protein, 22 aa, Artificial
  helical interface sequence
QKSTQNAIDGITNKVNSVIEKM

SEQ ID NO: 21148 - protein, 46 aa, Artificial; identical to SEQ ID NO: 556
  helical interface sequence

SEQ ID NO: 21149 - protein, 22 aa, Artificial
  helical interface sequence
QKSTQNAIDGITNKVNSVIEKM

SEQ ID NO: 21150 - protein, 10 aa, Artificial
  helical interface sequence
YEELREQLSS

SEQ ID NO: 21151 - protein, 22 aa, Artificial
  helical interface sequence
QKSTQNAIDGITNKVNSVIEKM

SEQ ID NO: 21152 - protein, 15 aa, Artificial
  helical interface sequence
GFPINFLTLYVTVQH

SEQ ID NO: 21153 - protein, 22 aa, Artificial
  helical interface sequence
AADGDALVKRFKNSVKWYHFDH

SEQ ID NO: 21154 - protein, 22 aa, Artificial
  helical interface sequence
IPDARNAALRAKAEAAEFRYKY

SEQ ID NO: 21155 - protein, 13 aa, Artificial
  helical interface sequence
VESLTQSVCDLAL

SEQ ID NO: 21156 - protein, 15 aa, Artificial
  helical interface sequence
VERAGHLLCDKAQKN

SEQ ID NO: 21157 - protein, 22 aa, Artificial
  helical interface sequence
AADCQFWETWLGSQCRLHELRE

SEQ ID NO: 21158 - protein, 15 aa, Artificial
  helical interface sequence
VERAGHLLCDKAQKN

SEQ ID NO: 21159 - protein, 19 aa, Artificial
  helical interface sequence
KEETVDFIKHSLSQAIKWD

SEQ ID NO: 21160 - protein, 7 aa, Artificial
  helical interface sequence
DEQLKSG

SEQ ID NO: 21161 - protein, 7 aa, Artificial
  helical interface sequence
DEQLKSG

SEQ ID NO: 21162 - protein, 15 aa, Artificial
  helical interface sequence
IFYAELARGIEDIAT

SEQ ID NO: 21163 - protein, 15 aa, Artificial
  helical interface sequence
IFYAELARGIEDIAT

SEQ ID NO: 21164 - protein, 20 aa, Artificial
  helical interface sequence
VARKQQLIRDVIDVTNKSIG

SEQ ID NO: 21165 - protein, 30 aa, Artificial; identical to SEQ ID NO: 11699
  helical interface sequence

SEQ ID NO: 21166 - protein, 20 aa, Artificial
  helical interface sequence
DSQKKAIERMKDTLRIAYLT

SEQ ID NO: 21167 - protein, 29 aa, Artificial
  helical interface sequence
CDEKTQSLGVKFLDEYQSKVKRQIFSGYQ

SEQ ID NO: 21168 - protein, 7 aa, Artificial
  helical interface sequence
PDEIKQS

SEQ ID NO: 21169 - protein, 26 aa, Artificial
  helical interface sequence
PRSWLATSHFVLAFFFLVGHLWHAGR

SEQ ID NO: 21170 - protein, 25 aa, Artificial
  helical interface sequence
WICVAYSAPLASAFAVFLIYPIGQG

SEQ ID NO: 21171 - protein, 25 aa, Artificial
  helical interface sequence
LWTFIALHGAFGLIGFMLRQFEIAR

SEQ ID NO: 21172 - protein, 17 aa, Artificial
  helical interface sequence
YNAIAFSAPIAVFVSVF

SEQ ID NO: 21173 - protein, 7 aa, Artificial
  helical interface sequence
RWLHFFM

SEQ ID NO: 21174 - protein, 21 aa, Artificial
  helical interface sequence
VIMIPTLLAATICFVIAFIAA

SEQ ID NO: 21175 - protein, 21 aa, Artificial
  helical interface sequence
VIMIPTLLAATICFVIAFIAA

SEQ ID NO: 21176 - protein, 13 aa, Artificial
  helical interface sequence
PPTVKSYARKAIF

SEQ ID NO: 21177 - protein, 6 aa, Artificial
  helical interface sequence
VDEKLG

SEQ ID NO: 21178 - protein, 13 aa, Artificial
  helical interface sequence
AKQQVETFLEQLK

SEQ ID NO: 21179 - protein, 27 aa, Artificial
  helical interface sequence
TVRWVAVHTLAVPTIFFLGAIAAMQFI

SEQ ID NO: 21180 - protein, 27 aa, Artificial
  helical interface sequence
PFHMMGVAGVLGGALLCAIHGATVENT

SEQ ID NO: 21181 - protein, 27 aa, Artificial
  helical interface sequence
PFHMMGVAGVLGGALLCAIHGATVENT

SEQ ID NO: 21182 - protein, 8 aa, Artificial
  helical interface sequence
EEELARAN

SEQ ID NO: 21183 - protein, 8 aa, Artificial
  helical interface sequence
EEELARAN

SEQ ID NO: 21184 - protein, 21 aa, Artificial
  helical interface sequence
FYTKNLLLNEGIRAWMAPQDQ

SEQ ID NO: 21185 - protein, 26 aa, Artificial
  helical interface sequence
QLGLIATALFVLVPSVFLIILYVQTE

SEQ ID NO: 21186 - protein, 25 aa, Artificial
  helical interface sequence
PDIYKAFLEILHTYQKEQRNAKEAG

SEQ ID NO: 21187 - protein, 11 aa, Artificial
  helical interface sequence
EDLLSEFGQFL

SEQ ID NO: 21188 - protein, 10 aa, Artificial
  helical interface sequence
WEEAERFCTE

SEQ ID NO: 21189 - protein, 14 aa, Artificial
  helical interface sequence
PDRITELLDAKEAA

SEQ ID NO: 21190 - protein, 10 aa, Artificial
  helical interface sequence
LLDYLRETVG

SEQ ID NO: 21191 - protein, 7 aa, Artificial
  helical interface sequence
PTHRAAA

SEQ ID NO: 21192 - protein, 16 aa, Artificial
  helical interface sequence
IEATGLMLMSNLFTLR

SEQ ID NO: 21193 - protein, 18 aa, Artificial
  helical interface sequence
VERLKCVVEKFAVNHINR

SEQ ID NO: 21194 - protein, 6 aa, Artificial
  helical interface sequence
RSERKK

SEQ ID NO: 21195 - protein, 22 aa, Artificial
  helical interface sequence
RPTIYSNVIKGMRVLVDAREKL

SEQ ID NO: 21196 - protein, 14 aa, Artificial
  helical interface sequence
ESTVATVVETLAKH

SEQ ID NO: 21197 - protein, 14 aa, Artificial
  helical interface sequence
MRDVVFNYLHATAF

SEQ ID NO: 21198 - protein, 10 aa, Artificial
  helical interface sequence
PRYRQLARNW

SEQ ID NO: 21199 - protein, 33 aa, Artificial; identical to SEQ ID NO: 3637
  helical interface sequence

SEQ ID NO: 21200 - protein, 20 aa, Artificial
  helical interface sequence
ENLYDDRVFRIKRALDLSMR

SEQ ID NO: 21201 - protein, 14 aa, Artificial
  helical interface sequence
MRDVVFNYLHATAF

SEQ ID NO: 21202 - protein, 7 aa, Artificial
  helical interface sequence
YNRIRSG

SEQ ID NO: 21203 - protein, 10 aa, Artificial
  helical interface sequence
EDYVFSLLTG

SEQ ID NO: 21204 - protein, 10 aa, Artificial
  helical interface sequence
EFCSKMNQVC

SEQ ID NO: 21205 - protein, 7 aa, Artificial
  helical interface sequence
GKALCLM

SEQ ID NO: 21206 - protein, 15 aa, Artificial
  helical interface sequence
MRQAINNLQSTVAGH

SEQ ID NO: 21207 - protein, 20 aa, Artificial
  helical interface sequence
LEDACEHLADYLEAYWKATH

SEQ ID NO: 21208 - protein, 15 aa, Artificial
  helical interface sequence
VLRKSELEYYAMLSK

SEQ ID NO: 21209 - protein, 5 aa, Artificial
  helical interface sequence
ENELF

SEQ ID NO: 21210 - protein, 10 aa, Artificial
  helical interface sequence
LKYFLGIAGG

SEQ ID NO: 21211 - protein, 14 aa, Artificial
  helical interface sequence
PEEFMLVYKFARKH

SEQ ID NO: 21212 - protein, 17 aa, Artificial
  helical interface sequence
PCFFIVEGLYMRVRERL

SEQ ID NO: 21213 - protein, 7 aa, Artificial
  helical interface sequence
QAVRNRG

SEQ ID NO: 21214 - protein, 7 aa, Artificial
  helical interface sequence
ENIRPFI

SEQ ID NO: 21215 - protein, 8 aa, Artificial
  helical interface sequence
VAWRNRCK

SEQ ID NO: 21216 - protein, 6 aa, Artificial
  helical interface sequence
LGLDSM

SEQ ID NO: 21217 - protein, 10 aa, Artificial
  helical interface sequence
PCTLNCAKFN

SEQ ID NO: 21218 - protein, 17 aa, Artificial
  helical interface sequence
EKLLWTTSRVLKVLSVC

SEQ ID NO: 21219 - protein, 10 aa, Artificial
  helical interface sequence
AVNAAVQRVQ

SEQ ID NO: 21220 - protein, 5 aa, Artificial
  helical interface sequence
PETNS

SEQ ID NO: 21221 - protein, 14 aa, Artificial
  helical interface sequence
ACEIRALARQWAKK

SEQ ID NO: 21222 - protein, 5 aa, Artificial
  helical interface sequence
SCMCN

SEQ ID NO: 21223 - protein, 11 aa, Artificial
  helical interface sequence
LKSLLQWVTSR

SEQ ID NO: 21224 - protein, 8 aa, Artificial
  helical interface sequence
EVECQVAC

SEQ ID NO: 21225 - protein, 8 aa, Artificial
  helical interface sequence
MDRVLLKY

SEQ ID NO: 21226 - protein, 6 aa, Artificial
  helical interface sequence
HSLAPM

SEQ ID NO: 21227 - protein, 6 aa, Artificial
  helical interface sequence
PDSLEN

SEQ ID NO: 21228 - protein, 7 aa, Artificial
  helical interface sequence
DEQLKSG

SEQ ID NO: 21229 - protein, 16 aa, Artificial
  helical interface sequence
IHEGLKLANEQIQKAG

SEQ ID NO: 21230 - protein, 10 aa, Artificial
  helical interface sequence
LYFRRWLQDN

SEQ ID NO: 21231 - protein, 5 aa, Artificial
  helical interface sequence
RSAKA

SEQ ID NO: 21232 - protein, 34 aa, Artificial; identical to SEQ ID NO: 1665
  helical interface sequence

SEQ ID NO: 21233 - protein, 15 aa, Artificial
  helical interface sequence
KDFRFMATNDLMTEL

SEQ ID NO: 21234 - protein, 7 aa, Artificial
  helical interface sequence
EKELFES

SEQ ID NO: 21235 - protein, 14 aa, Artificial
  helical interface sequence
GDFNALSNMFTQLS

SEQ ID NO: 21236 - protein, 7 aa, Artificial
  helical interface sequence
EDLAKLA

SEQ ID NO: 21237 - protein, 7 aa, Artificial
  helical interface sequence
RFAKLLL

SEQ ID NO: 21238 - protein, 7 aa, Artificial
  helical interface sequence
KVITTVL

SEQ ID NO: 21239 - protein, 10 aa, Artificial
  helical interface sequence
IGISKSELVA

SEQ ID NO: 21240 - protein, 7 aa, Artificial
  helical interface sequence
KVITTVL

SEQ ID NO: 21241 - protein, 6 aa, Artificial
  helical interface sequence
CWHRIR

SEQ ID NO: 21242 - protein, 56 aa, Artificial; identical to SEQ ID NO: 6163
  helical interface sequence

SEQ ID NO: 21243 - protein, 20 aa, Artificial
  helical interface sequence
WRDRFLFVAEAIYKAQAETG

SEQ ID NO: 21244 - protein, 10 aa, Artificial
  helical interface sequence
PELAAACEVW

SEQ ID NO: 21245 - protein, 20 aa, Artificial
  helical interface sequence
WRDRFLFVAEAIYKAQAETG

SEQ ID NO: 21246 - protein, 14 aa, Artificial
  helical interface sequence
AKNYGRAVYECLRG

SEQ ID NO: 21247 - protein, 14 aa, Artificial
  helical interface sequence
PKIIDAALRACRRL

SEQ ID NO: 21248 - protein, 6 aa, Artificial
  helical interface sequence
KDEYER

SEQ ID NO: 21249 - protein, 21 aa, Artificial
  helical interface sequence
CLGGITLTCFLIQFATGFAMT

SEQ ID NO: 21250 - protein, 29 aa, Artificial
  helical interface sequence
GWLIRSIHRWSASMMVLMMILHVFRVYLT

SEQ ID NO: 21251 - protein, 10 aa, Artificial
  helical interface sequence
GVLISDLLRG

SEQ ID NO: 21252 - protein, 25 aa, Artificial
  helical interface sequence
PNRVKWMIAFICLVMLAQLMLILKK

SEQ ID NO: 21253 - protein, 10 aa, Artificial
  helical interface sequence
QVGYWAVKIV

SEQ ID NO: 21254 - protein, 25 aa, Artificial
  helical interface sequence
ILGAVFYIVFIALFFGIAVGIIFAI

SEQ ID NO: 21255 - protein, 6 aa, Artificial
  helical interface sequence
TLGGLF

SEQ ID NO: 21256 - protein, 10 aa, Artificial
  helical interface sequence
YAAYQQYKRP

SEQ ID NO: 21257 - protein, 10 aa, Artificial
  helical interface sequence
LLIDLLIKSN

SEQ ID NO: 21258 - protein, 6 aa, Artificial
  helical interface sequence
TMEELE

SEQ ID NO: 21259 - protein, 11 aa, Artificial
  helical interface sequence
YHQRLRLLKSG

SEQ ID NO: 21260 - protein, 24 aa, Artificial
  helical interface sequence
PAEREAELDDLKTELLNARAVQAA

SEQ ID NO: 21261 - protein, 13 aa, Artificial
  helical interface sequence
APLKVTQESIAVE

SEQ ID NO: 21262 - protein, 14 aa, Artificial
  helical interface sequence
SPVELEKLVREKKR

SEQ ID NO: 21263 - protein, 5 aa, Artificial
  helical interface sequence
VDMEN

SEQ ID NO: 21264 - protein, 10 aa, Artificial
  helical interface sequence
EKAMNDMDFQ

SEQ ID NO: 21265 - protein, 11 aa, Artificial
  helical interface sequence
TLQLAVICKQF

SEQ ID NO: 21266 - protein, 9 aa, Artificial
  helical interface sequence
QFEIARLVG

SEQ ID NO: 21267 - protein, 6 aa, Artificial
  helical interface sequence
PRGWFT

SEQ ID NO: 21268 - protein, 6 aa, Artificial
  helical interface sequence
RDVFSG

SEQ ID NO: 21269 - protein, 5 aa, Artificial
  helical interface sequence
PKMRN

SEQ ID NO: 21270 - protein, 12 aa, Artificial
  helical interface sequence
KQQVETFLEQLK

SEQ ID NO: 21271 - protein, 9 aa, Artificial
  helical interface sequence
QFEIARLVG

SEQ ID NO: 21272 - protein, 7 aa, Artificial
  helical interface sequence
QRLYKAL

SEQ ID NO: 21273 - protein, 6 aa, Artificial
  helical interface sequence
PRGWFT

SEQ ID NO: 21274 - protein, 6 aa, Artificial
  helical interface sequence
RDVFSG

SEQ ID NO: 21275 - protein, 12 aa, Artificial
  helical interface sequence
KQQVETFLEQLK

SEQ ID NO: 21276 - protein, 12 aa, Artificial
  helical interface sequence
FVIIYELLDELM

SEQ ID NO: 21277 - protein, 15 aa, Artificial
  helical interface sequence
MVVANRVAALSEIAE

SEQ ID NO: 21278 - protein, 10 aa, Artificial
  helical interface sequence
WAQIFILDCL

SEQ ID NO: 21279 - protein, 12 aa, Artificial
  helical interface sequence
FVIIYELLDELM

SEQ ID NO: 21280 - protein, 18 aa, Artificial
  helical interface sequence
SLVFSFLYKVVQVFSEYF

SEQ ID NO: 21281 - protein, 11 aa, Artificial
  helical interface sequence
LRELIRTIRTA

SEQ ID NO: 21282 - protein, 15 aa, Artificial
  helical interface sequence
MVVANRVAALSEIAE

SEQ ID NO: 21283 - protein, 12 aa, Artificial
  helical interface sequence
FVIIYELLDELM

SEQ ID NO: 21284 - protein, 17 aa, Artificial
  helical interface sequence
PEFKADCASGIFLAAEK

SEQ ID NO: 21285 - protein, 15 aa, Artificial
  helical interface sequence
MVVANRVAALSEIAE

SEQ ID NO: 21286 - protein, 12 aa, Artificial
  helical interface sequence
FVIIYELLDELM

SEQ ID NO: 21287 - protein, 15 aa, Artificial
  helical interface sequence
MVVANRVAALSEIAE

SEQ ID NO: 21288 - protein, 18 aa, Artificial
  helical interface sequence
VDFVRKAVRAIGRCAIKV

SEQ ID NO: 21289 - protein, 18 aa, Artificial
  helical interface sequence
SLVFSFLYKVVQVFSEYF

SEQ ID NO: 21290 - protein, 7 aa, Artificial
  helical interface sequence
EESIRDN

SEQ ID NO: 21291 - protein, 15 aa, Artificial
  helical interface sequence
MVVANRVAALSEIAE

SEQ ID NO: 21292 - protein, 18 aa, Artificial
  helical interface sequence
KEKKKEAVKKVIASMTVG

SEQ ID NO: 21293 - protein, 12 aa, Artificial
  helical interface sequence
FVIIYELLDELM

SEQ ID NO: 21294 - protein, 29 aa, Artificial
  helical interface sequence
PEYWDQETRNMKAHSQTDRANLGTLRGYY

SEQ ID NO: 21295 - protein, 14 aa, Artificial
  helical interface sequence
LGILMEVLQNCVDE

SEQ ID NO: 21296 - protein, 10 aa, Artificial
  helical interface sequence
QLVKDRKFLR

SEQ ID NO: 21297 - protein, 9 aa, Artificial
  helical interface sequence
YVKFTAMIK

SEQ ID NO: 21298 - protein, 15 aa, Artificial
  helical interface sequence
KQSTLNFLLALDEYA

SEQ ID NO: 21299 - protein, 15 aa, Artificial
  helical interface sequence
VRELLPILEQVAQTG

SEQ ID NO: 21300 - protein, 17 aa, Artificial
  helical interface sequence
KAHYRRFLEFRDILEYE

SEQ ID NO: 21301 - protein, 16 aa, Artificial
  helical interface sequence
RYDEFVRTHNEFIMSD

SEQ ID NO: 21302 - protein, 10 aa, Artificial
  helical interface sequence
KLHEEAARLF

SEQ ID NO: 21303 - protein, 11 aa, Artificial
  helical interface sequence
EEEIREMLRRV

SEQ ID NO: 21304 - protein, 11 aa, Artificial
  helical interface sequence
ALDLAKGLLEL

SEQ ID NO: 21305 - protein, 10 aa, Artificial
  helical interface sequence
WADAENFCTQ

SEQ ID NO: 21306 - protein, 10 aa, Artificial
  helical interface sequence
WDDAERFCTE

SEQ ID NO: 21307 - protein, 38 aa, Artificial; identical to SEQ ID NO: 6906
  helical interface sequence

SEQ ID NO: 21308 - protein, 18 aa, Artificial
  helical interface sequence
FEEATAEAYRYAALHAKV

SEQ ID NO: 21309 - protein, 17 aa, Artificial
  helical interface sequence
GAIFDRVLTELVSKMRD

SEQ ID NO: 21310 - protein, 8 aa, Artificial
  helical interface sequence
PTKVDKLQ

SEQ ID NO: 21311 - protein, 23 aa, Artificial
  helical interface sequence
PEYKNYFQYLKERITNQVQLLLT

SEQ ID NO: 21312 - protein, 23 aa, Artificial
  helical interface sequence
PEYKNYFQYLKERITNQVQLLLT

SEQ ID NO: 21313 - protein, 23 aa, Artificial
  helical interface sequence
PEYKNYFQYLKERITNQVQLLLT

SEQ ID NO: 21314 - protein, 23 aa, Artificial
  helical interface sequence
PEYKNYFQYLKERITNQVQLLLT

SEQ ID NO: 21315 - protein, 23 aa, Artificial
  helical interface sequence
PEYKNYFQYLKERITNQVQLLLT

SEQ ID NO: 21316 - protein, 7 aa, Artificial
  helical interface sequence
GYLSDYY

SEQ ID NO: 21317 - protein, 24 aa, Artificial
  helical interface sequence
TQLHQADLKLEDLCDIVLVISNLL

SEQ ID NO: 21318 - protein, 12 aa, Artificial
  helical interface sequence
QGEFKELVRKDL

SEQ ID NO: 21319 - protein, 12 aa, Artificial
  helical interface sequence
RDDLKKLLETES

SEQ ID NO: 21320 - protein, 12 aa, Artificial
  helical interface sequence
EKVIEHIMEDLD

SEQ ID NO: 21321 - protein, 5 aa, Artificial
  helical interface sequence
MFRLF

SEQ ID NO: 21322 - protein, 23 aa, Artificial
  helical interface sequence
PAEVEALREKVYASLEAYCKHKY

SEQ ID NO: 21323 - protein, 16 aa, Artificial
  helical interface sequence
IFDRVLTELVSKMRDM

SEQ ID NO: 21324 - protein, 21 aa, Artificial
  helical interface sequence
REEIDQLQEEMALILNNHIME

SEQ ID NO: 21325 - protein, 9 aa, Artificial
  helical interface sequence
HMNVLLAEA

SEQ ID NO: 21326 - protein, 22 aa, Artificial
  helical interface sequence
AWVPGHFHLQVASLVTLTAMGS

SEQ ID NO: 21327 - protein, 15 aa, Artificial
  helical interface sequence
NLTTTVNNSQLEIQQ

SEQ ID NO: 21328 - protein, 24 aa, Artificial
  helical interface sequence
GALSKDAYIRSFQQSWNEYAKRQG

SEQ ID NO: 21329 - protein, 19 aa, Artificial
  helical interface sequence
PANFKILSHCILVLLAVKF

SEQ ID NO: 21330 - protein, 18 aa, Artificial
  helical interface sequence
IFKGHIQDALFNMVTIMT

SEQ ID NO: 21331 - protein, 8 aa, Artificial
  helical interface sequence
PDEIKQSG

SEQ ID NO: 21332 - protein, 17 aa, Artificial
  helical interface sequence
KKAIERMKDTLRIAYLT

SEQ ID NO: 21333 - protein, 12 aa, Artificial
  helical interface sequence
LQYMKNVFKEKY

SEQ ID NO: 21334 - protein, 10 aa, Artificial
  helical interface sequence
LFTLVEWAKR

SEQ ID NO: 21335 - protein, 25 aa, Artificial
  helical interface sequence
VLPLVTHFADINTFMVLQVIKFTKD

SEQ ID NO: 21336 - protein, 15 aa, Artificial
  helical interface sequence
LLALAQALERLSLLW

SEQ ID NO: 21337 - protein, 5 aa, Artificial
  helical interface sequence
PSRLQ

SEQ ID NO: 21338 - protein, 21 aa, Artificial
  helical interface sequence
WEALLVEMLGLLHRIAMVQLS

SEQ ID NO: 21339 - protein, 21 aa, Artificial
  helical interface sequence
PTDIQLYYQTLLIGRKELPYA

SEQ ID NO: 21340 - protein, 15 aa, Artificial
  helical interface sequence
TLQRELLLLVNLKRQ

SEQ ID NO: 21341 - protein, 18 aa, Artificial
  helical interface sequence
PHFMALLQTHDVVAHEVY

SEQ ID NO: 21342 - protein, 10 aa, Artificial
  helical interface sequence
NDAKELKRIL

SEQ ID NO: 21343 - protein, 20 aa, Artificial
  helical interface sequence
KDFQNAFKIHNAITVHMNKA

SEQ ID NO: 21344 - protein, 19 aa, Artificial
  helical interface sequence
PVNFKLLSHCLLSTLAVHL

SEQ ID NO: 21345 - protein, 5 aa, Artificial
  helical interface sequence
DRQIR

SEQ ID NO: 21346 - protein, 22 aa, Artificial
  helical interface sequence
VADARVLVDFARISAQQEKVTY

SEQ ID NO: 21347 - protein, 23 aa, Artificial
  helical interface sequence
VADARVLVDFARISAQQEKVTYG

SEQ ID NO: 21348 - protein, 13 aa, Artificial
  helical interface sequence
FQVEYAREAVKKG

SEQ ID NO: 21349 - protein, 8 aa, Artificial
  helical interface sequence
VEKDVAII

SEQ ID NO: 21350 - protein, 15 aa, Artificial
  helical interface sequence
PESLLAKTRALNEEG

SEQ ID NO: 21351 - protein, 10 aa, Artificial
  helical interface sequence
PGRDRRTEEE

SEQ ID NO: 21352 - protein, 9 aa, Artificial
  helical interface sequence
FPDFVHAVK

SEQ ID NO: 21353 - protein, 12 aa, Artificial
  helical interface sequence
FILREKITHFDH

SEQ ID NO: 21354 - protein, 7 aa, Artificial
  helical interface sequence
FFAENEQ

SEQ ID NO: 21355 - protein, 6 aa, Artificial
  helical interface sequence
SEQLTS

SEQ ID NO: 21356 - protein, 19 aa, Artificial
  helical interface sequence
LSYPIYIITGFAAFIYAKT

SEQ ID NO: 21357 - protein, 19 aa, Artificial
  helical interface sequence
LSYPIYIITGFAAFIYAKT

SEQ ID NO: 21358 - protein, 20 aa, Artificial
  helical interface sequence
IGAARSKFGDALWRNVFNYA

SEQ ID NO: 21359 - protein, 16 aa, Artificial
  helical interface sequence
EPVLNTQLAHLAKQHE

SEQ ID NO: 21360 - protein, 18 aa, Artificial
  helical interface sequence
GRRIAIAQAVFKDLFANV

SEQ ID NO: 21361 - protein, 20 aa, Artificial
  helical interface sequence
IGAARSKFGDALWRNVFNYA

SEQ ID NO: 21362 - protein, 16 aa, Artificial
  helical interface sequence
EPVLNTQLAHLAKQHE

SEQ ID NO: 21363 - protein, 20 aa, Artificial
  helical interface sequence
IGAARSKFGDALWRNVFNYA

SEQ ID NO: 21364 - protein, 16 aa, Artificial
  helical interface sequence
EPVLNTQLAHLAKQHE

SEQ ID NO: 21365 - protein, 17 aa, Artificial
  helical interface sequence
PATLNEQLSHLATQHKA

SEQ ID NO: 21366 - protein, 17 aa, Artificial
  helical interface sequence
PATLNEQLSHLATQHKA

SEQ ID NO: 21367 - protein, 20 aa, Artificial
  helical interface sequence
IGAARSKFGDALWRNVFNYA

SEQ ID NO: 21368 - protein, 19 aa, Artificial
  helical interface sequence
AASRVSAGEEVFAALFKMV

SEQ ID NO: 21369 - protein, 16 aa, Artificial
  helical interface sequence
EPVLNTQLAHLAKQHE

SEQ ID NO: 21370 - protein, 20 aa, Artificial
  helical interface sequence
IGAARSKFGDALWRNVFNYA

SEQ ID NO: 21371 - protein, 15 aa, Artificial
  helical interface sequence
PLQRLKVKRQWAEAY

SEQ ID NO: 21372 - protein, 15 aa, Artificial
  helical interface sequence
DAAAAIVQAQWEDVW

SEQ ID NO: 21373 - protein, 5 aa, Artificial
  helical interface sequence
VHIGL

SEQ ID NO: 21374 - protein, 5 aa, Artificial
  helical interface sequence
VHIGL

SEQ ID NO: 21375 - protein, 10 aa, Artificial
  helical interface sequence
AGWITDTITN

SEQ ID NO: 21376 - protein, 22 aa, Artificial
  helical interface sequence
AQGALANIAVDKANLEIMTKRS

SEQ ID NO: 21377 - protein, 7 aa, Artificial
  helical interface sequence
PLGVPSR

SEQ ID NO: 21378 - protein, 11 aa, Artificial
  helical interface sequence
FPEFLTMMARK

SEQ ID NO: 21379 - protein, 10 aa, Artificial
  helical interface sequence
HGTHVAGTVA

SEQ ID NO: 21380 - protein, 8 aa, Artificial
  helical interface sequence
QTEKYDFA

SEQ ID NO: 21381 - protein, 5 aa, Artificial
  helical interface sequence
DEQLK

SEQ ID NO: 21382 - protein, 11 aa, Artificial
  helical interface sequence
AKNCRSLMHHV

SEQ ID NO: 21383 - protein, 9 aa, Artificial
  helical interface sequence
RSVTRSYYR

SEQ ID NO: 21384 - protein, 22 aa, Artificial
  helical interface sequence
MDEVRTLQENLRQLQDEYDQQQ

SEQ ID NO: 21385 - protein, 10 aa, Artificial
  helical interface sequence
IEMKIKLFGG

SEQ ID NO: 21386 - protein, 13 aa, Artificial
  helical interface sequence
EALGEFIFDKKLL

SEQ ID NO: 21387 - protein, 13 aa, Artificial
  helical interface sequence
EALGEFIFDKKLL

SEQ ID NO: 21388 - protein, 22 aa, Artificial
  helical interface sequence
ATDVTTLNEMFRYKTNLYKLKE

SEQ ID NO: 21389 - protein, 21 aa, Artificial
  helical interface sequence
NADSRILIEKARVEAQSHRLT

SEQ ID NO: 21390 - protein, 20 aa, Artificial
  helical interface sequence
ISDMQHIERLLKDLVTENAY

SEQ ID NO: 21391 - protein, 22 aa, Artificial
  helical interface sequence
IPDGRHLVNRGREEAASFKKLY

SEQ ID NO: 21392 - protein, 18 aa, Artificial
  helical interface sequence
VQVAEEAIVNAMRVLYYR

SEQ ID NO: 21393 - protein, 15 aa, Artificial
  helical interface sequence
PETFTQLVSSSLYER

SEQ ID NO: 21394 - protein, 14 aa, Artificial
  helical interface sequence
GPDYRVLVDKSRKV

SEQ ID NO: 21395 - protein, 22 aa, Artificial
  helical interface sequence
TADAEILINTARIHAQNYLKTY

SEQ ID NO: 21396 - protein, 23 aa, Artificial
  helical interface sequence
TADARSMIEHARTAAVTHNLYYD

SEQ ID NO: 21397 - protein, 17 aa, Artificial
  helical interface sequence
PSYIFEYLATVMYQRRS

SEQ ID NO: 21398 - protein, 5 aa, Artificial
  helical interface sequence
SLVFN

SEQ ID NO: 21399 - protein, 9 aa, Artificial
  helical interface sequence
SDQLFGMCE

SEQ ID NO: 21400 - protein, 18 aa, Artificial
  helical interface sequence
PEDLFETISQALLNAADR

SEQ ID NO: 21401 - protein, 5 aa, Artificial
  helical interface sequence
PSDVV

SEQ ID NO: 21402 - protein, 5 aa, Artificial
  helical interface sequence
LESFF

SEQ ID NO: 21403 - protein, 5 aa, Artificial
  helical interface sequence
GLMIF

SEQ ID NO: 21404 - protein, 5 aa, Artificial
  helical interface sequence
GLMIF

SEQ ID NO: 21405 - protein, 5 aa, Artificial
  helical interface sequence
GLMIF

SEQ ID NO: 21406 - protein, 5 aa, Artificial
  helical interface sequence
GLMIF

SEQ ID NO: 21407 - protein, 7 aa, Artificial
  helical interface sequence
DEQLKSG

SEQ ID NO: 21408 - protein, 10 aa, Artificial
  helical interface sequence
PRHLQLAVRN

SEQ ID NO: 21409 - protein, 5 aa, Artificial
  helical interface sequence
RSSRA

SEQ ID NO: 21410 - protein, 8 aa, Artificial
  helical interface sequence
DFLEDRRA

SEQ ID NO: 21411 - protein, 8 aa, Artificial
  helical interface sequence
RPDAEYWN

SEQ ID NO: 21412 - protein, 20 aa, Artificial
  helical interface sequence
GALANIAVDKANLEIMTKRS

SEQ ID NO: 21413 - protein, 26 aa, Artificial
  helical interface sequence
TDLVETLELQNLMLCALQTIYGAEAR

SEQ ID NO: 21414 - protein, 27 aa, Artificial
  helical interface sequence
RDFLYHATAATGVVVTGAAVWPLINQM

SEQ ID NO: 21415 - protein, 12 aa, Artificial
  helical interface sequence
SDERKEIAEYVM

SEQ ID NO: 21416 - protein, 5 aa, Artificial
  helical interface sequence
YRCLW

SEQ ID NO: 21417 - protein, 15 aa, Artificial
  helical interface sequence
EEQIAEFKEAFSLFD

SEQ ID NO: 21418 - protein, 11 aa, Artificial
  helical interface sequence
FPEFLTMMARK

SEQ ID NO: 21419 - protein, 17 aa, Artificial
  helical interface sequence
QKEIDRLNEVAKNLNES

SEQ ID NO: 21420 - protein, 14 aa, Artificial
  helical interface sequence
AELARGIEDIASMY

SEQ ID NO: 21421 - protein, 9 aa, Artificial
  helical interface sequence
TFSDLAAQL

SEQ ID NO: 21422 - protein, 15 aa, Artificial
  helical interface sequence
PLQVARVLAKLAEKE

SEQ ID NO: 21423 - protein, 12 aa, Artificial
  helical interface sequence
SVWIGGSILASL

SEQ ID NO: 21424 - protein, 11 aa, Artificial
  helical interface sequence
VAVGKLLDYLN

SEQ ID NO: 21425 - protein, 6 aa, Artificial
  helical interface sequence
LNNNVE

SEQ ID NO: 21426 - protein, 9 aa, Artificial
  helical interface sequence
SVDIYFRRQ

SEQ ID NO: 21427 - protein, 7 aa, Artificial
  helical interface sequence
PKKRMRY

SEQ ID NO: 21428 - protein, 18 aa, Artificial
  helical interface sequence
GAIFDRVLTELVSKMRDM

SEQ ID NO: 21429 - protein, 23 aa, Artificial
  helical interface sequence
PVTNICQAADKQLFTLVEWAKRI

SEQ ID NO: 21430 - protein, 11 aa, Artificial
  helical interface sequence
LDDQVILLRAG

SEQ ID NO: 21431 - protein, 18 aa, Artificial
  helical interface sequence
GAIFDRVLTELVSKMRDM

SEQ ID NO: 21432 - protein, 7 aa, Artificial
  helical interface sequence
RFAKLLL

SEQ ID NO: 21433 - protein, 7 aa, Artificial
  helical interface sequence
RFAKLLL

SEQ ID NO: 21434 - protein, 7 aa, Artificial
  helical interface sequence
PLLSEIW

SEQ ID NO: 21435 - protein, 11 aa, Artificial
  helical interface sequence
LDDQVILLRAG

SEQ ID NO: 21436 - protein, 6 aa, Artificial
  helical interface sequence
FLMEML

SEQ ID NO: 21437 - protein, 27 aa, Artificial
  helical interface sequence
GVHDFILVRATAIVLTLYIIYMVGFFA

SEQ ID NO: 21438 - protein, 8 aa, Artificial
  helical interface sequence
ISEIELTP

SEQ ID NO: 21439 - protein, 16 aa, Artificial
  helical interface sequence
FDGFAIFARDMDMTLN

SEQ ID NO: 21440 - protein, 16 aa, Artificial
  helical interface sequence
LDWTDEFLMKVSEISG

SEQ ID NO: 21441 - protein, 13 aa, Artificial
  helical interface sequence
KRWKKAVDAILAA

SEQ ID NO: 21442 - protein, 8 aa, Artificial
  helical interface sequence
ISEIELTP

SEQ ID NO: 21443 - protein, 29 aa, Artificial
  helical interface sequence
PEYWDRNTQIFKTNTQTYRESLRNLRGYY

SEQ ID NO: 21444 - protein, 16 aa, Artificial
  helical interface sequence
QLARIEEAREQRISEI

SEQ ID NO: 21445 - protein, 12 aa, Artificial
  helical interface sequence
VQEALDKAREGR

SEQ ID NO: 21446 - protein, 6 aa, Artificial
  helical interface sequence
MEQLTS

SEQ ID NO: 21447 - protein, 10 aa, Artificial
  helical interface sequence
EEEAQVRKEN

SEQ ID NO: 21448 - protein, 11 aa, Artificial
  helical interface sequence
NEQVLKFVMDG

SEQ ID NO: 21449 - protein, 21 aa, Artificial
  helical interface sequence
FYTKNLLLNEGIRAWMAPQDQ

SEQ ID NO: 21450 - protein, 25 aa, Artificial
  helical interface sequence
FEGVALAHIVLSGLLFLAACWHWVY

SEQ ID NO: 21451 - protein, 6 aa, Artificial
  helical interface sequence
PKMRNL

SEQ ID NO: 21452 - protein, 12 aa, Artificial
  helical interface sequence
AKQQVETFLEQL

SEQ ID NO: 21453 - protein, 20 aa, Artificial
  helical interface sequence
LLFPCAYLALGGWLTGTTFV

SEQ ID NO: 21454 - protein, 14 aa, Artificial
  helical interface sequence
YLALGGWLTGTTFV

SEQ ID NO: 21455 - protein, 10 aa, Artificial
  helical interface sequence
WFDILDDWLK

SEQ ID NO: 21456 - protein, 10 aa, Artificial
  helical interface sequence
WFDILDDWLK

SEQ ID NO: 21457 - protein, 17 aa, Artificial
  helical interface sequence
PFHMMGVAGVLGGALLC

SEQ ID NO: 21458 - protein, 17 aa, Artificial
  helical interface sequence
PFHMMGVAGVLGGALLC

SEQ ID NO: 21459 - protein, 21 aa, Artificial
  helical interface sequence
FYTKNLLLNEGIRAWMAPQDQ

SEQ ID NO: 21460 - protein, 21 aa, Artificial
  helical interface sequence
FYTKNLLLNEGIRAWMAPQDQ

SEQ ID NO: 21461 - protein, 9 aa, Artificial
  helical interface sequence
EPYVTEMAQ

SEQ ID NO: 21462 - protein, 48 aa, Artificial; identical to SEQ ID NO: 1758
  helical interface sequence

SEQ ID NO: 21463 - protein, 7 aa, Artificial
  helical interface sequence
AARLASE

SEQ ID NO: 21464 - protein, 12 aa, Artificial
  helical interface sequence
CTNAMQVINNYQ

SEQ ID NO: 21465 - protein, 27 aa, Artificial
  helical interface sequence
SLSISALLALTVFLLLLADKVPETSLS

SEQ ID NO: 21466 - protein, 11 aa, Artificial
  helical interface sequence
SKEMLDAFRAL

SEQ ID NO: 21467 - protein, 16 aa, Artificial
  helical interface sequence
IDQAKAWGNAQYKKYG

SEQ ID NO: 21468 - protein, 18 aa, Artificial
  helical interface sequence
RREIELSKVIREALESAV

SEQ ID NO: 21469 - protein, 7 aa, Artificial
  helical interface sequence
SRAQSLD

SEQ ID NO: 21470 - protein, 19 aa, Artificial
  helical interface sequence
KEFLGTYNKLTETCFLDCV

SEQ ID NO: 21471 - protein, 6 aa, Artificial
  helical interface sequence
AELEVE

SEQ ID NO: 21472 - protein, 10 aa, Artificial
  helical interface sequence
TGPMDEYLIA

SEQ ID NO: 21473 - protein, 8 aa, Artificial
  helical interface sequence
LSEINRSF

SEQ ID NO: 21474 - protein, 24 aa, Artificial
  helical interface sequence
ATGKAKCARDIGYYLRMVTYCLVV

SEQ ID NO: 21475 - protein, 24 aa, Artificial
  helical interface sequence
ATGKAKCARDIGYYLRMVTYCLVV

SEQ ID NO: 21476 - protein, 11 aa, Artificial
  helical interface sequence
FDRNVAALRRS

SEQ ID NO: 21477 - protein, 12 aa, Artificial
  helical interface sequence
STAIREISLLKE

SEQ ID NO: 21478 - protein, 39 aa, Artificial
  helical interface sequence
EFADKLNEQKIAQLEEVKQASIKQIQDAIDMEKSQQALV

SEQ ID NO: 21479 - protein, 14 aa, Artificial
  helical interface sequence
LFVDKIREYRTKRQ

SEQ ID NO: 21480 - protein, 14 aa, Artificial
  helical interface sequence
AQVDAEEKEDVKSC

SEQ ID NO: 21481 - protein, 40 aa, Artificial
  helical interface sequence
QLLSGIVQQQNNLLRAIEAQQHLLQLTVWGIKQLQARILA

SEQ ID NO: 21482 - protein, 6 aa, Artificial
  helical interface sequence
LRPLLY

SEQ ID NO: 21483 - protein, 8 aa, Artificial
  helical interface sequence
ETGTAIVK

SEQ ID NO: 21484 - protein, 7 aa, Artificial
  helical interface sequence
AASLRER

SEQ ID NO: 21485 - protein, 8 aa, Artificial
  helical interface sequence
RYLESLRN

SEQ ID NO: 21486 - protein, 21 aa, Artificial
  helical interface sequence
KKERQKVVEQMEHEMKEAAKA

SEQ ID NO: 21487 - protein, 12 aa, Artificial
  helical interface sequence
TVAGFSLALDKY

SEQ ID NO: 21488 - protein, 6 aa, Artificial
  helical interface sequence
AEDEAF

SEQ ID NO: 21489 - protein, 5 aa, Artificial
  helical interface sequence
WVTSP

SEQ ID NO: 21490 - protein, 8 aa, Artificial
  helical interface sequence
PRQVLAEF

SEQ ID NO: 21491 - protein, 5 aa, Artificial
  helical interface sequence
WVTSP

SEQ ID NO: 21492 - protein, 7 aa, Artificial
  helical interface sequence
GPCFLEH

SEQ ID NO: 21493 - protein, 9 aa, Artificial
  helical interface sequence
AAELRHVMT

SEQ ID NO: 21494 - protein, 29 aa, Artificial
  helical interface sequence
LARVHYHRTLKAIVYLQCCYRRMMAKREL

SEQ ID NO: 21495 - protein, 7 aa, Artificial
  helical interface sequence
EAELQDM

SEQ ID NO: 21496 - protein, 11 aa, Artificial
  helical interface sequence
IKNLRRVAKEL

SEQ ID NO: 21497 - protein, 16 aa, Artificial
  helical interface sequence
YYGHWIATVAYNLVDT

SEQ ID NO: 21498 - protein, 7 aa, Artificial
  helical interface sequence
HEDLYII

SEQ ID NO: 21499 - protein, 8 aa, Artificial
  helical interface sequence
AMHRAAAK

SEQ ID NO: 21500 - protein, 5 aa, Artificial
  helical interface sequence
AEDEA

SEQ ID NO: 21501 - protein, 5 aa, Artificial
  helical interface sequence
WVTSP

SEQ ID NO: 21502 - protein, 5 aa, Artificial
  helical interface sequence
WVTSP

SEQ ID NO: 21503 - protein, 6 aa, Artificial
  helical interface sequence
AEDEAF

SEQ ID NO: 21504 - protein, 5 aa, Artificial
  helical interface sequence
WVTSP

SEQ ID NO: 21505 - protein, 5 aa, Artificial
  helical interface sequence
AEDEA

SEQ ID NO: 21506 - protein, 5 aa, Artificial
  helical interface sequence
WVTSP

SEQ ID NO: 21507 - protein, 5 aa, Artificial
  helical interface sequence
WVTSP

SEQ ID NO: 21508 - protein, 5 aa, Artificial
  helical interface sequence
WVTSP

SEQ ID NO: 21509 - protein, 9 aa, Artificial
  helical interface sequence
PFHIACSVG

SEQ ID NO: 21510 - protein, 9 aa, Artificial
  helical interface sequence
PFHIACSVG

SEQ ID NO: 21511 - protein, 12 aa, Artificial
  helical interface sequence
SFTEFVKVLEKV

SEQ ID NO: 21512 - protein, 22 aa, Artificial
  helical interface sequence
PVATTIFLFGTLVTIWLGIGAT

SEQ ID NO: 21513 - protein, 9 aa, Artificial
  helical interface sequence
WEAAERFCM

SEQ ID NO: 21514 - protein, 9 aa, Artificial
  helical interface sequence
AAEVEFLAE

SEQ ID NO: 21515 - protein, 17 aa, Artificial
  helical interface sequence
PEIVECVMEQLEHMEEN

SEQ ID NO: 21516 - protein, 6 aa, Artificial
  helical interface sequence
RFVAMI

SEQ ID NO: 21517 - protein, 5 aa, Artificial
  helical interface sequence
GYLIR

SEQ ID NO: 21518 - protein, 26 aa, Artificial
  helical interface sequence
PRDKLVCILNCCKVINNLLLNASIAS

SEQ ID NO: 21519 - protein, 8 aa, Artificial
  helical interface sequence
LWLAKGLF

SEQ ID NO: 21520 - protein, 10 aa, Artificial
  helical interface sequence
EDGLRQVLEE

SEQ ID NO: 21521 - protein, 10 aa, Artificial
  helical interface sequence
DALRNAFSMF

SEQ ID NO: 21522 - protein, 11 aa, Artificial
  helical interface sequence
SAEIRNVLKML

SEQ ID NO: 21523 - protein, 7 aa, Artificial
  helical interface sequence
KEDVMRH

SEQ ID NO: 21524 - protein, 20 aa, Artificial
  helical interface sequence
PAAMQLALDQRAALADRTLG

SEQ ID NO: 21525 - protein, 16 aa, Artificial
  helical interface sequence
PSTLALLATGAVMINR

SEQ ID NO: 21526 - protein, 30 aa, Artificial
  helical interface sequence
SEYWDRETRSARDTAQIFRVNLRTLRGYYN

SEQ ID NO: 21527 - protein, 23 aa, Artificial
  helical interface sequence
SEHYDVARGVQKILQDYKSLQDI

SEQ ID NO: 21528 - protein, 29 aa, Artificial
  helical interface sequence
PEYWDGETRKVKAHSQTHRVDLGTLRGYY

SEQ ID NO: 21529 - protein, 29 aa, Artificial
  helical interface sequence
KYGDIALKKKLEQNTKKLDEESSQLETTT

SEQ ID NO: 21530 - protein, 10 aa, Artificial
  helical interface sequence
AMDVVYALKR

SEQ ID NO: 21531 - protein, 29 aa, Artificial
  helical interface sequence
SKAMGIMNSFVNDIFERIASEASRLAHYN

SEQ ID NO: 21532 - protein, 12 aa, Artificial
  helical interface sequence
IFDAKNACDHLS

SEQ ID NO: 21533 - protein, 7 aa, Artificial
  helical interface sequence
AEFLLEH

SEQ ID NO: 21534 - protein, 17 aa, Artificial
  helical interface sequence
PEGYRKALRLMKQAEKF

SEQ ID NO: 21535 - protein, 30 aa, Artificial; identical to SEQ ID NO: 5978
  helical interface sequence

SEQ ID NO: 21536 - protein, 14 aa, Artificial
  helical interface sequence
PEYVQAMLDREKLT

SEQ ID NO: 21537 - protein, 16 aa, Artificial
  helical interface sequence
SSAMGAGVLRKKIQDA

SEQ ID NO: 21538 - protein, 22 aa, Artificial
  helical interface sequence
FNEFDNLRRGGIQFADTRGYAY

SEQ ID NO: 21539 - protein, 23 aa, Artificial
  helical interface sequence
AAVAVEFARLYAVELEHYEKLEG

SEQ ID NO: 21540 - protein, 14 aa, Artificial
  helical interface sequence
FAGKINRLAIMVRG

SEQ ID NO: 21541 - protein, 29 aa, Artificial
  helical interface sequence
SSAVMALQEASEAYLVALFEDTNLCAIHA

SEQ ID NO: 21542 - protein, 10 aa, Artificial
  helical interface sequence
PRHLQLAVRN

SEQ ID NO: 21543 - protein, 6 aa, Artificial
  helical interface sequence
DEQLKS

SEQ ID NO: 21544 - protein, 5 aa, Artificial
  helical interface sequence
DEQLK

SEQ ID NO: 21545 - protein, 32 aa, Artificial; identical to SEQ ID NO: 6008
  helical interface sequence

SEQ ID NO: 21546 - protein, 32 aa, Artificial; identical to SEQ ID NO: 6008
  helical interface sequence

SEQ ID NO: 21547 - protein, 32 aa, Artificial; identical to SEQ ID NO: 6008
  helical interface sequence

SEQ ID NO: 21548 - protein, 32 aa, Artificial; identical to SEQ ID NO: 6008
  helical interface sequence

SEQ ID NO: 21549 - protein, 6 aa, Artificial
  helical interface sequence
SEELQA

SEQ ID NO: 21550 - protein, 6 aa, Artificial
  helical interface sequence
SEELQA

SEQ ID NO: 21551 - protein, 13 aa, Artificial
  helical interface sequence
IAELVRSALEVSG

SEQ ID NO: 21552 - protein, 14 aa, Artificial
  helical interface sequence
TERHRAEVRRAVND

SEQ ID NO: 21553 - protein, 6 aa, Artificial
  helical interface sequence
AFHSGE

SEQ ID NO: 21554 - protein, 7 aa, Artificial
  helical interface sequence
RRLVAYL

SEQ ID NO: 21555 - protein, 19 aa, Artificial
  helical interface sequence
AQGALANIAVDKANLEIMT

SEQ ID NO: 21556 - protein, 12 aa, Artificial
  helical interface sequence
YCRHNYGVGESF

SEQ ID NO: 21557 - protein, 12 aa, Artificial
  helical interface sequence
GLQALDIVTKER

SEQ ID NO: 21558 - protein, 12 aa, Artificial
  helical interface sequence
IMPLLRRVQQEE

SEQ ID NO: 21559 - protein, 13 aa, Artificial
  helical interface sequence
AEELWDYLTETLG

SEQ ID NO: 21560 - protein, 6 aa, Artificial
  helical interface sequence
LCAAAC

SEQ ID NO: 21561 - protein, 11 aa, Artificial
  helical interface sequence
QDFLEETFAKY

SEQ ID NO: 21562 - protein, 19 aa, Artificial
  helical interface sequence
TPCREGVAGFMVNLFAKIG

SEQ ID NO: 21563 - protein, 6 aa, Artificial
  helical interface sequence
LCAAAC

SEQ ID NO: 21564 - protein, 11 aa, Artificial
  helical interface sequence
QDFLEETFAKY

SEQ ID NO: 21565 - protein, 13 aa, Artificial
  helical interface sequence
DAAEVALYERLLQ

SEQ ID NO: 21566 - protein, 22 aa, Artificial
  helical interface sequence
PMFKIYFWLLAADFVILTWVGA

SEQ ID NO: 21567 - protein, 5 aa, Artificial
  helical interface sequence
ISQLF

SEQ ID NO: 21568 - protein, 22 aa, Artificial
  helical interface sequence
YATAGAGAVATGAAVWPLINQM

SEQ ID NO: 21569 - protein, 23 aa, Artificial
  helical interface sequence
YATAGAGAVATGAAVWPLINQMN

SEQ ID NO: 21570 - protein, 7 aa, Artificial
  helical interface sequence
SEQLTSG

SEQ ID NO: 21571 - protein, 11 aa, Artificial
  helical interface sequence
LEAATNFLLDS

SEQ ID NO: 21572 - protein, 6 aa, Artificial
  helical interface sequence
SEQLTS

SEQ ID NO: 21573 - protein, 6 aa, Artificial
  helical interface sequence
SEQLTS

SEQ ID NO: 21574 - protein, 7 aa, Artificial
  helical interface sequence
SEQLTSG

SEQ ID NO: 21575 - protein, 5 aa, Artificial
  helical interface sequence
SEEFQ

SEQ ID NO: 21576 - protein, 22 aa, Artificial
  helical interface sequence
KDLLEQRRAAVDTYCRHNYGVG

SEQ ID NO: 21577 - protein, 9 aa, Artificial
  helical interface sequence
DKQWSRYLF

SEQ ID NO: 21578 - protein, 8 aa, Artificial
  helical interface sequence
GYHVGWTH

SEQ ID NO: 21579 - protein, 14 aa, Artificial
  helical interface sequence
VREVFEMATRAGLQ

SEQ ID NO: 21580 - protein, 7 aa, Artificial
  helical interface sequence
GEEIIRA

SEQ ID NO: 21581 - protein, 5 aa, Artificial
  helical interface sequence
KDEYE

SEQ ID NO: 21582 - protein, 16 aa, Artificial
  helical interface sequence
WKLLAKGLLIRERLKR

SEQ ID NO: 21583 - protein, 12 aa, Artificial
  helical interface sequence
SACTNTINTQLR

SEQ ID NO: 21584 - protein, 10 aa, Artificial
  helical interface sequence
VEIILNLKEL

SEQ ID NO: 21585 - protein, 13 aa, Artificial
  helical interface sequence
PGRILFARIVGEA

SEQ ID NO: 21586 - protein, 5 aa, Artificial
  helical interface sequence
VAESL

SEQ ID NO: 21587 - protein, 5 aa, Artificial
  helical interface sequence
GHCTD

SEQ ID NO: 21588 - protein, 19 aa, Artificial
  helical interface sequence
QDDAELATRAIPELTKLLN

SEQ ID NO: 21589 - protein, 7 aa, Artificial
  helical interface sequence
SDFQCKD

SEQ ID NO: 21590 - protein, 18 aa, Artificial
  helical interface sequence
KVKKMVLQERIDNVLKQG

SEQ ID NO: 21591 - protein, 21 aa, Artificial
  helical interface sequence
LEKRQGALELIKKGYTQQLAF

SEQ ID NO: 21592 - protein, 13 aa, Artificial
  helical interface sequence
WMEILILGVVYRS

SEQ ID NO: 21593 - protein, 11 aa, Artificial
  helical interface sequence
LADQMSLLQSA

SEQ ID NO: 21594 - protein, 16 aa, Artificial
  helical interface sequence
LVLQSHLGHLADQHIQ

SEQ ID NO: 21595 - protein, 16 aa, Artificial
  helical interface sequence
PATLKEELDHLQVQHE

SEQ ID NO: 21596 - protein, 12 aa, Artificial
  helical interface sequence
YEDRREIRHIWD

SEQ ID NO: 21597 - protein, 16 aa, Artificial
  helical interface sequence
VLEGLKVKSEWGRAYG

SEQ ID NO: 21598 - protein, 15 aa, Artificial
  helical interface sequence
KKTIRQLKARISNLE

SEQ ID NO: 21599 - protein, 8 aa, Artificial
  helical interface sequence
LDESCKIL

SEQ ID NO: 21600 - protein, 15 aa, Artificial
  helical interface sequence
MDKINNRFNYLFEVN

SEQ ID NO: 21601 - protein, 8 aa, Artificial
  helical interface sequence
SKEALQIL

SEQ ID NO: 21602 - protein, 8 aa, Artificial
  helical interface sequence
SKEALQIL

SEQ ID NO: 21603 - protein, 15 aa, Artificial
  helical interface sequence
KKKLKEVHRKIMLAN

SEQ ID NO: 21604 - protein, 9 aa, Artificial
  helical interface sequence
ENEFIAICT

SEQ ID NO: 21605 - protein, 7 aa, Artificial
  helical interface sequence
YHELKVA

SEQ ID NO: 21606 - protein, 7 aa, Artificial
  helical interface sequence
YHELKVA

SEQ ID NO: 21607 - protein, 7 aa, Artificial
  helical interface sequence
RRYYENY

SEQ ID NO: 21608 - protein, 11 aa, Artificial
  helical interface sequence
PGRDRRTEEEN

SEQ ID NO: 21609 - protein, 13 aa, Artificial
  helical interface sequence
AITVAEMRLGVAL

SEQ ID NO: 21610 - protein, 10 aa, Artificial
  helical interface sequence
FQFARLIDAK

SEQ ID NO: 21611 - protein, 15 aa, Artificial
  helical interface sequence
ATDRCCFVHDCCYAR

SEQ ID NO: 21612 - protein, 18 aa, Artificial
  helical interface sequence
PEVRQSSFALLGDLTKAC

SEQ ID NO: 21613 - protein, 15 aa, Artificial
  helical interface sequence
LFPLLECLSSVATAL

SEQ ID NO: 21614 - protein, 18 aa, Artificial
  helical interface sequence
KTLLENTAITIGRLGYVC

SEQ ID NO: 21615 - protein, 9 aa, Artificial
  helical interface sequence
YERLSEWAD

SEQ ID NO: 21616 - protein, 19 aa, Artificial
  helical interface sequence
FQEFMAFVAMVTTACHEFF

SEQ ID NO: 21617 - protein, 18 aa, Artificial
  helical interface sequence
ELEKAMVALIDVFHQYSG

SEQ ID NO: 21618 - protein, 20 aa, Artificial
  helical interface sequence
FQEFMAFVAMVTTACHEFFE

SEQ ID NO: 21619 - protein, 11 aa, Artificial
  helical interface sequence
RICLRELAHKG

SEQ ID NO: 21620 - protein, 7 aa, Artificial
  helical interface sequence
DEQLKSG

SEQ ID NO: 21621 - protein, 11 aa, Artificial
  helical interface sequence
AMDVVYALKRQ

SEQ ID NO: 21622 - protein, 15 aa, Artificial
  helical interface sequence
TDVLNFFFLSIDQSD

SEQ ID NO: 21623 - protein, 65 aa, Artificial; identical to SEQ ID NO: 7671
  helical interface sequence

SEQ ID NO: 21624 - protein, 14 aa, Artificial
  helical interface sequence
TREGNDLYREMKET

SEQ ID NO: 21625 - protein, 9 aa, Artificial
  helical interface sequence
PAPATTFAH

SEQ ID NO: 21626 - protein, 20 aa, Artificial
  helical interface sequence
QEHYDVASKVQETLQTYKSL

SEQ ID NO: 21627 - protein, 12 aa, Artificial
  helical interface sequence
YAAYLNVAAQAI

SEQ ID NO: 21628 - protein, 20 aa, Artificial
  helical interface sequence
QEHYDVASKVQETLQTYKSL

SEQ ID NO: 21629 - protein, 7 aa, Artificial
  helical interface sequence
AELFYKG

SEQ ID NO: 21630 - protein, 8 aa, Artificial
  helical interface sequence
QDIIAILG

SEQ ID NO: 21631 - protein, 22 aa, Artificial
  helical interface sequence
PGARARVALTGLTIAEYFRDEE

SEQ ID NO: 21632 - protein, 6 aa, Artificial
  helical interface sequence
RGISEL

SEQ ID NO: 21633 - protein, 8 aa, Artificial
  helical interface sequence
PAPATTFA

SEQ ID NO: 21634 - protein, 63 aa, Artificial; identical to SEQ ID NO: 15867
  helical interface sequence

SEQ ID NO: 21635 - protein, 8 aa, Artificial
  helical interface sequence
DIDIKIRS

SEQ ID NO: 21636 - protein, 13 aa, Artificial
  helical interface sequence
YEDQQKQLEQVIA

SEQ ID NO: 21637 - protein, 15 aa, Artificial
  helical interface sequence
YAWEALEVVLIGAAF

SEQ ID NO: 21638 - protein, 10 aa, Artificial
  helical interface sequence
YSDLLEIDNM

SEQ ID NO: 21639 - protein, 8 aa, Artificial
  helical interface sequence
VSSLMNGL

SEQ ID NO: 21640 - protein, 8 aa, Artificial
  helical interface sequence
HVDVFFQK

SEQ ID NO: 21641 - protein, 7 aa, Artificial
  helical interface sequence
LEQLEAQ

SEQ ID NO: 21642 - protein, 7 aa, Artificial
  helical interface sequence
LEQLEAQ

SEQ ID NO: 21643 - protein, 16 aa, Artificial
  helical interface sequence
KEEMMDIVKAIYDMED

SEQ ID NO: 21644 - protein, 7 aa, Artificial
  helical interface sequence
LEQLEAQ

SEQ ID NO: 21645 - protein, 15 aa, Artificial
  helical interface sequence
KEEMMDIVKAIYDMD

SEQ ID NO: 21646 - protein, 11 aa, Artificial
  helical interface sequence
ISAYDDELAFY

SEQ ID NO: 21647 - protein, 13 aa, Artificial
  helical interface sequence
VHEKLRWTFNLYD

SEQ ID NO: 21648 - protein, 16 aa, Artificial
  helical interface sequence
KEEMMDIVKAIYDMMG

SEQ ID NO: 21649 - protein, 9 aa, Artificial
  helical interface sequence
QFNLRMQAA

SEQ ID NO: 21650 - protein, 23 aa, Artificial
  helical interface sequence
PSWGAEVAHAQKTIMEKYHDEYG

SEQ ID NO: 21651 - protein, 8 aa, Artificial
  helical interface sequence
EASLKKVL

SEQ ID NO: 21652 - protein, 8 aa, Artificial
  helical interface sequence
EASLKKVL

SEQ ID NO: 21653 - protein, 16 aa, Artificial
  helical interface sequence
LPNVMMSADAMLEGIE

SEQ ID NO: 21654 - protein, 14 aa, Artificial
  helical interface sequence
DIGKNIVTALLRAN

SEQ ID NO: 21655 - protein, 6 aa, Artificial
  helical interface sequence
YNVALE

SEQ ID NO: 21656 - protein, 16 aa, Artificial
  helical interface sequence
LPNVMMSADAMLEGIE

SEQ ID NO: 21657 - protein, 8 aa, Artificial
  helical interface sequence
EASLKKVL

SEQ ID NO: 21658 - protein, 23 aa, Artificial
  helical interface sequence
PSWGAEVAHAQKTIMEKYHDEYG

SEQ ID NO: 21659 - protein, 17 aa, Artificial
  helical interface sequence
DALMVGMGVVIRLYDEG

SEQ ID NO: 21660 - protein, 19 aa, Artificial
  helical interface sequence
LPNVMMSADAMLEGIEYCK

SEQ ID NO: 21661 - protein, 21 aa, Artificial
  helical interface sequence
LPNVMMSADAMLEGIEYCKEN

SEQ ID NO: 21662 - protein, 19 aa, Artificial
  helical interface sequence
ADAQLDAVLSAATETYSGL

SEQ ID NO: 21663 - protein, 9 aa, Artificial
  helical interface sequence
QKFVLQLLE

SEQ ID NO: 21664 - protein, 7 aa, Artificial
  helical interface sequence
FQVAERA

SEQ ID NO: 21665 - protein, 11 aa, Artificial
  helical interface sequence
ELGRPDAEYWN

SEQ ID NO: 21666 - protein, 17 aa, Artificial
  helical interface sequence
EPVAQQISHLVIMHEEG

SEQ ID NO: 21667 - protein, 17 aa, Artificial
  helical interface sequence
AQGALANIAVDKANLEI

SEQ ID NO: 21668 - protein, 17 aa, Artificial
  helical interface sequence
AQGALANIAVDKANLEI

SEQ ID NO: 21669 - protein, 9 aa, Artificial
  helical interface sequence
KDLLEQRRA

SEQ ID NO: 21670 - protein, 7 aa, Artificial
  helical interface sequence
DFAKAVF

SEQ ID NO: 21671 - protein, 22 aa, Artificial
  helical interface sequence
YKEIFNMMFLKLSVVFDTQRKE

SEQ ID NO: 21672 - protein, 10 aa, Artificial
  helical interface sequence
RSERKKWIHC

SEQ ID NO: 21673 - protein, 7 aa, Artificial
  helical interface sequence
GHIARRF

SEQ ID NO: 21674 - protein, 7 aa, Artificial
  helical interface sequence
PEKYIQA

SEQ ID NO: 21675 - protein, 5 aa, Artificial
  helical interface sequence
RYQEA

SEQ ID NO: 21676 - protein, 10 aa, Artificial
  helical interface sequence
EAELQDMINE

SEQ ID NO: 21677 - protein, 7 aa, Artificial
  helical interface sequence
VYDIVRT

SEQ ID NO: 21678 - protein, 7 aa, Artificial
  helical interface sequence
VYDIVRT

SEQ ID NO: 21679 - protein, 12 aa, Artificial
  helical interface sequence
KSNYEVLEKDVG

SEQ ID NO: 21680 - protein, 12 aa, Artificial
  helical interface sequence
DIRILRDIEQYY

SEQ ID NO: 21681 - protein, 17 aa, Artificial
  helical interface sequence
FRETADVIAKVAFKMYL

SEQ ID NO: 21682 - protein, 7 aa, Artificial
  helical interface sequence
RPLWRHY

SEQ ID NO: 21683 - protein, 15 aa, Artificial
  helical interface sequence
LMERAWEIARTLAKQ

SEQ ID NO: 21684 - protein, 5 aa, Artificial
  helical interface sequence
SEQLT

SEQ ID NO: 21685 - protein, 5 aa, Artificial
  helical interface sequence
RPFCT

SEQ ID NO: 21686 - protein, 5 aa, Artificial
  helical interface sequence
SMEAK

SEQ ID NO: 21687 - protein, 12 aa, Artificial
  helical interface sequence
IVNIKNTLTFAL

SEQ ID NO: 21688 - protein, 11 aa, Artificial
  helical interface sequence
NDKIQAVIDAG

SEQ ID NO: 21689 - protein, 15 aa, Artificial
  helical interface sequence
YKVVSPALRAVGNIV

SEQ ID NO: 21690 - protein, 25 aa, Artificial
  helical interface sequence
SKIVQVALNGLENILRLGEQEAKRN

SEQ ID NO: 21691 - protein, 26 aa, Artificial
  helical interface sequence
MEGIHRWAIWMAVLVTLTGGIGILLS

SEQ ID NO: 21692 - protein, 15 aa, Artificial
  helical interface sequence
IFRFTQAGSEVSALL

SEQ ID NO: 21693 - protein, 14 aa, Artificial
  helical interface sequence
RSTVAQLVKRLTDA

SEQ ID NO: 21694 - protein, 38 aa, Artificial; identical to SEQ ID NO: 10974
  helical interface sequence

SEQ ID NO: 21695 - protein, 69 aa, Artificial; identical to SEQ ID NO: 2946
  helical interface sequence

SEQ ID NO: 21696 - protein, 7 aa, Artificial
  helical interface sequence
TLLGWFG

SEQ ID NO: 21697 - protein, 15 aa, Artificial
  helical interface sequence
EGDVKSFSRVMVHVF

SEQ ID NO: 21698 - protein, 29 aa, Artificial
  helical interface sequence
AAIYLTAVLEYLTAEVLELAGNAAKDLKV

SEQ ID NO: 21699 - protein, 13 aa, Artificial
  helical interface sequence
EIQQWHKGFLRDC

SEQ ID NO: 21700 - protein, 6 aa, Artificial
  helical interface sequence
EVELLK

SEQ ID NO: 21701 - protein, 11 aa, Artificial
  helical interface sequence
KAVWHKLLSKQ

SEQ ID NO: 21702 - protein, 14 aa, Artificial
  helical interface sequence
AETSKLIYDFIEDQ

SEQ ID NO: 21703 - protein, 13 aa, Artificial
  helical interface sequence
MSELIKIIRRRLQ

SEQ ID NO: 21704 - protein, 16 aa, Artificial
  helical interface sequence
SEQTVNVLAQILKRLN

SEQ ID NO: 21705 - protein, 14 aa, Artificial
  helical interface sequence
CRTMKNVLNHMTHC

SEQ ID NO: 21706 - protein, 17 aa, Artificial
  helical interface sequence
STVREQLKKKLVEVLES

SEQ ID NO: 21707 - protein, 5 aa, Artificial
  helical interface sequence
VAFFY

SEQ ID NO: 21708 - protein, 14 aa, Artificial
  helical interface sequence
LHLPAVILKTFLRE

SEQ ID NO: 21709 - protein, 15 aa, Artificial
  helical interface sequence
EDDVKSLSRVMIHVF

SEQ ID NO: 21710 - protein, 7 aa, Artificial
  helical interface sequence
PLFRRFR

SEQ ID NO: 21711 - protein, 10 aa, Artificial
  helical interface sequence
PEKVLDQLLK

SEQ ID NO: 21712 - protein, 22 aa, Artificial
  helical interface sequence
GEQNMIGMTPTVIAVHYLDETE

SEQ ID NO: 21713 - protein, 22 aa, Artificial
  helical interface sequence
KDLYLECISQLGQVVGQRLHLD

SEQ ID NO: 21714 - protein, 29 aa, Artificial
  helical interface sequence
SSAVMALQEASEAYLVGLFEDTNLCAIHA

SEQ ID NO: 21715 - protein, 11 aa, Artificial
  helical interface sequence
SSVKKILSKAS

SEQ ID NO: 21716 - protein, 8 aa, Artificial
  helical interface sequence
CMLISYTS

SEQ ID NO: 21717 - protein, 14 aa, Artificial
  helical interface sequence
TLDMLTVKVKLDEA

SEQ ID NO: 21718 - protein, 12 aa, Artificial
  helical interface sequence
CKDSILEAIDAG

SEQ ID NO: 21719 - protein, 8 aa, Artificial
  helical interface sequence
IEKVAEET

SEQ ID NO: 21720 - protein, 30 aa, Artificial
  helical interface sequence
EIAALAFVNTVVATAAAILGWIFGEWALRG

SEQ ID NO: 21721 - protein, 11 aa, Artificial
  helical interface sequence
AEQAKIAEEAG

SEQ ID NO: 21722 - protein, 11 aa, Artificial
  helical interface sequence
AEQAKIAEEAG

SEQ ID NO: 21723 - protein, 11 aa, Artificial
  helical interface sequence
AEQAKIAEEAG

SEQ ID NO: 21724 - protein, 7 aa, Artificial
  helical interface sequence
LQWPKEQ

SEQ ID NO: 21725 - protein, 10 aa, Artificial
  helical interface sequence
KEAAEVLQNN

SEQ ID NO: 21726 - protein, 15 aa, Artificial
  helical interface sequence
IIARRWINGMLISLL

SEQ ID NO: 21727 - protein, 14 aa, Artificial
  helical interface sequence
YDRVLSELVNKMKE

SEQ ID NO: 21728 - protein, 23 aa, Artificial
  helical interface sequence
VQEVEMLREKIYGVLEEYTRTTH

SEQ ID NO: 21729 - protein, 7 aa, Artificial
  helical interface sequence
RQITQVY

SEQ ID NO: 21730 - protein, 11 aa, Artificial
  helical interface sequence
EKLRWTFNLYD

SEQ ID NO: 21731 - protein, 15 aa, Artificial
  helical interface sequence
KEEMMDIVKAIYDMM

SEQ ID NO: 21732 - protein, 7 aa, Artificial
  helical interface sequence
VDVFFQK

SEQ ID NO: 21733 - protein, 11 aa, Artificial
  helical interface sequence
STYAHYLFNAF

SEQ ID NO: 21734 - protein, 17 aa, Artificial
  helical interface sequence
IFYAELARGIEDIATMY

SEQ ID NO: 21735 - protein, 5 aa, Artificial
  helical interface sequence
KKDFG

SEQ ID NO: 21736 - protein, 16 aa, Artificial
  helical interface sequence
IALSRLAQERKAWRKD

SEQ ID NO: 21737 - protein, 19 aa, Artificial
  helical interface sequence
NYSIIDKLGKIVDDLVLCM

SEQ ID NO: 21738 - protein, 18 aa, Artificial
  helical interface sequence
PEEREKKRQFEMKRKLHY

SEQ ID NO: 21739 - protein, 7 aa, Artificial
  helical interface sequence
ASINRIY

SEQ ID NO: 21740 - protein, 10 aa, Artificial
  helical interface sequence
KHVIECAKQK

SEQ ID NO: 21741 - protein, 7 aa, Artificial
  helical interface sequence
KALKDAV

SEQ ID NO: 21742 - protein, 13 aa, Artificial
  helical interface sequence
FQTREATRKNLQE

SEQ ID NO: 21743 - protein, 13 aa, Artificial
  helical interface sequence
FQTREATRKNLQE

SEQ ID NO: 21744 - protein, 16 aa, Artificial
  helical interface sequence
VQSQVVEAFIRWRQRF

SEQ ID NO: 21745 - protein, 12 aa, Artificial
  helical interface sequence
QDVAEEVRAVLE

SEQ ID NO: 21746 - protein, 13 aa, Artificial
  helical interface sequence
ADTGAFLLADAFG

SEQ ID NO: 21747 - protein, 7 aa, Artificial
  helical interface sequence
LYQLENY

SEQ ID NO: 21748 - protein, 7 aa, Artificial
  helical interface sequence
LYQLENY

SEQ ID NO: 21749 - protein, 19 aa, Artificial
  helical interface sequence
VNQHLCGSHLVEALYLVCG

SEQ ID NO: 21750 - protein, 7 aa, Artificial
  helical interface sequence
LYQLENY

SEQ ID NO: 21751 - protein, 19 aa, Artificial
  helical interface sequence
VNQHLCGSHLVEALYLVCG

SEQ ID NO: 21752 - protein, 7 aa, Artificial
  helical interface sequence
LYQLENY

SEQ ID NO: 21753 - protein, 7 aa, Artificial
  helical interface sequence
LYQLENY

SEQ ID NO: 21754 - protein, 19 aa, Artificial
  helical interface sequence
VNQHLCGSHLVEALYLVCG

SEQ ID NO: 21755 - protein, 7 aa, Artificial
  helical interface sequence
LYQLENY

SEQ ID NO: 21756 - protein, 13 aa, Artificial
  helical interface sequence
PLRVFFTVSLPLS

SEQ ID NO: 21757 - protein, 9 aa, Artificial
  helical interface sequence
DGQKEELIR

SEQ ID NO: 21758 - protein, 8 aa, Artificial
  helical interface sequence
TIEQIKAK

SEQ ID NO: 21759 - protein, 7 aa, Artificial
  helical interface sequence
DEQLKSG

SEQ ID NO: 21760 - protein, 17 aa, Artificial
  helical interface sequence
HKNLLILYDAIGTLADS

SEQ ID NO: 21761 - protein, 11 aa, Artificial
  helical interface sequence
TNETTKSIERG

SEQ ID NO: 21762 - protein, 24 aa, Artificial
  helical interface sequence
PAEREAELDDLKTELLNARAVQAA

SEQ ID NO: 21763 - protein, 11 aa, Artificial
  helical interface sequence
YPQGLAMAREI

SEQ ID NO: 21764 - protein, 16 aa, Artificial
  helical interface sequence
MALKRIQKELQDLQRD

SEQ ID NO: 21765 - protein, 12 aa, Artificial
  helical interface sequence
RKDIEEHLQRVG

SEQ ID NO: 21766 - protein, 7 aa, Artificial
  helical interface sequence
SEQLTSG

SEQ ID NO: 21767 - protein, 5 aa, Artificial
  helical interface sequence
PEEIR

SEQ ID NO: 21768 - protein, 14 aa, Artificial
  helical interface sequence
QATLFELILAANYL

SEQ ID NO: 21769 - protein, 30 aa, Artificial; identical to SEQ ID NO: 664
  helical interface sequence

SEQ ID NO: 21770 - protein, 15 aa, Artificial
  helical interface sequence
GDVDHSTLVTLFKLL

SEQ ID NO: 21771 - protein, 13 aa, Artificial
  helical interface sequence
WYIEALAQVFSER

SEQ ID NO: 21772 - protein, 15 aa, Artificial
  helical interface sequence
GDVDHSTLVTLFKLL

SEQ ID NO: 21773 - protein, 6 aa, Artificial
  helical interface sequence
IAGTSG

SEQ ID NO: 21774 - protein, 9 aa, Artificial
  helical interface sequence
TLFKWMIFN

SEQ ID NO: 21775 - protein, 32 aa, Artificial
  helical interface sequence
NGQLARAAKIWPQLEANTQQIMDYYDSSLETA

SEQ ID NO: 21776 - protein, 11 aa, Artificial
  helical interface sequence
KTLQQGIQLAQ

SEQ ID NO: 21777 - protein, 7 aa, Artificial
  helical interface sequence
PIFAQQN

SEQ ID NO: 21778 - protein, 10 aa, Artificial
  helical interface sequence
WRVRLAIIEY

SEQ ID NO: 21779 - protein, 9 aa, Artificial
  helical interface sequence
VKHIYEFLK

SEQ ID NO: 21780 - protein, 11 aa, Artificial
  helical interface sequence
IEAAREIIIRE

SEQ ID NO: 21781 - protein, 5 aa, Artificial
  helical interface sequence
RFRGN

SEQ ID NO: 21782 - protein, 7 aa, Artificial
  helical interface sequence
KEEAQQI

SEQ ID NO: 21783 - protein, 7 aa, Artificial
  helical interface sequence
KEEAQQI

SEQ ID NO: 21784 - protein, 13 aa, Artificial
  helical interface sequence
TLGNLIAGTLRRI

SEQ ID NO: 21785 - protein, 14 aa, Artificial
  helical interface sequence
LGLYNEAVKIIHDF

SEQ ID NO: 21786 - protein, 14 aa, Artificial
  helical interface sequence
PQQLEILRQQVVSE

SEQ ID NO: 21787 - protein, 14 aa, Artificial
  helical interface sequence
PQQLEILRQQVVSE

SEQ ID NO: 21788 - protein, 18 aa, Artificial
  helical interface sequence
YRYKALSYLLFNWIHPTY

SEQ ID NO: 21789 - protein, 12 aa, Artificial
  helical interface sequence
LHEIKQELKDLF

SEQ ID NO: 21790 - protein, 15 aa, Artificial
  helical interface sequence
LSRLMHFARCCASFK

SEQ ID NO: 21791 - protein, 12 aa, Artificial
  helical interface sequence
SVWIGGSILASL

SEQ ID NO: 21792 - protein, 11 aa, Artificial
  helical interface sequence
YMELTKLLLNH

SEQ ID NO: 21793 - protein, 10 aa, Artificial
  helical interface sequence
FPHVLEKEKT

SEQ ID NO: 21794 - protein, 11 aa, Artificial
  helical interface sequence
TNETTKSIERG

SEQ ID NO: 21795 - protein, 5 aa, Artificial
  helical interface sequence
PQRAV

SEQ ID NO: 21796 - protein, 5 aa, Artificial
  helical interface sequence
DQLVN

SEQ ID NO: 21797 - protein, 6 aa, Artificial
  helical interface sequence
PRVLSS

SEQ ID NO: 21798 - protein, 11 aa, Artificial
  helical interface sequence
KWERLTVADAL

SEQ ID NO: 21799 - protein, 5 aa, Artificial
  helical interface sequence
PQRAV

SEQ ID NO: 21800 - protein, 10 aa, Artificial
  helical interface sequence
VNLAVNNLLS

SEQ ID NO: 21801 - protein, 11 aa, Artificial
  helical interface sequence
RSVIIRELQRT

SEQ ID NO: 21802 - protein, 7 aa, Artificial
  helical interface sequence
SDFQCRD

SEQ ID NO: 21803 - protein, 29 aa, Artificial
  helical interface sequence
RRDFLYYATAGAGAVATGAAVWPLINQMN

SEQ ID NO: 21804 - protein, 22 aa, Artificial
  helical interface sequence
PMFKIYFWLLAADFVILTWVGA

SEQ ID NO: 21805 - protein, 32 aa, Artificial; identical to SEQ ID NO: 462
  helical interface sequence

SEQ ID NO: 21806 - protein, 32 aa, Artificial; identical to SEQ ID NO: 462
  helical interface sequence

SEQ ID NO: 21807 - protein, 28 aa, Artificial
  helical interface sequence
RRDFLYYATAGAGAVATGAAVWPLINQM

SEQ ID NO: 21808 - protein, 22 aa, Artificial
  helical interface sequence
PMFKIYFWLLAADFVILTWVGA

SEQ ID NO: 21809 - protein, 22 aa, Artificial
  helical interface sequence
PMFKIYFWLLAADFVILTWVGA

SEQ ID NO: 21810 - protein, 15 aa, Artificial
  helical interface sequence
VDLAFASVEHIMRNV

SEQ ID NO: 21811 - protein, 32 aa, Artificial; identical to SEQ ID NO: 462
  helical interface sequence

SEQ ID NO: 21812 - protein, 22 aa, Artificial
  helical interface sequence
PMFKIYFWLLAADFVILTWVGA

SEQ ID NO: 21813 - protein, 6 aa, Artificial
  helical interface sequence
ISQLFN

SEQ ID NO: 21814 - protein, 15 aa, Artificial
  helical interface sequence
VDLAFASVEHIMRNV

SEQ ID NO: 21815 - protein, 15 aa, Artificial
  helical interface sequence
VDLAFASVEHIMRNV

SEQ ID NO: 21816 - protein, 7 aa, Artificial
  helical interface sequence
RAHEAKI

SEQ ID NO: 21817 - protein, 5 aa, Artificial
  helical interface sequence
AEEQS

SEQ ID NO: 21818 - protein, 6 aa, Artificial
  helical interface sequence
VGEALM

SEQ ID NO: 21819 - protein, 15 aa, Artificial
  helical interface sequence
EEYGAETLERMFITY

SEQ ID NO: 21820 - protein, 13 aa, Artificial
  helical interface sequence
LLQFNKMIKFETR

SEQ ID NO: 21821 - protein, 18 aa, Artificial
  helical interface sequence
GDLRREISMSIKRLMDLG

SEQ ID NO: 21822 - protein, 6 aa, Artificial
  helical interface sequence
NAVLKL

SEQ ID NO: 21823 - protein, 8 aa, Artificial
  helical interface sequence
VEELMKLG

SEQ ID NO: 21824 - protein, 10 aa, Artificial
  helical interface sequence
FLTAARIAKE

SEQ ID NO: 21825 - protein, 13 aa, Artificial
  helical interface sequence
EQELEDYIRHVLN

SEQ ID NO: 21826 - protein, 15 aa, Artificial
  helical interface sequence
REKVEVQLPELFHKI

SEQ ID NO: 21827 - protein, 19 aa, Artificial
  helical interface sequence
PVNFKLLSHCLLVTLANHH

SEQ ID NO: 21828 - protein, 19 aa, Artificial
  helical interface sequence
PVNFKLLSHCLLVTLANHH

SEQ ID NO: 21829 - protein, 7 aa, Artificial
  helical interface sequence
VGYLEQK

SEQ ID NO: 21830 - protein, 9 aa, Artificial
  helical interface sequence
DNVRPLCYS

SEQ ID NO: 21831 - protein, 9 aa, Artificial
  helical interface sequence
SEISSILEK

SEQ ID NO: 21832 - protein, 8 aa, Artificial
  helical interface sequence
LPNLLRGY

SEQ ID NO: 21833 - protein, 8 aa, Artificial
  helical interface sequence
IKPVQRIM

SEQ ID NO: 21834 - protein, 6 aa, Artificial
  helical interface sequence
VRFLEQ

SEQ ID NO: 21835 - protein, 7 aa, Artificial
  helical interface sequence
PQVAADN

SEQ ID NO: 21836 - protein, 16 aa, Artificial
  helical interface sequence
MSDLKGTLELVAKKLF

SEQ ID NO: 21837 - protein, 15 aa, Artificial
  helical interface sequence
KLLSHSLLVTLACHL

SEQ ID NO: 21838 - protein, 16 aa, Artificial
  helical interface sequence
AGAYGAEALERMFLSF

SEQ ID NO: 21839 - protein, 5 aa, Artificial
  helical interface sequence
TQRFF

SEQ ID NO: 21840 - protein, 31 aa, Artificial
  helical interface sequence
NLSRVAGLEKQLAIELKVKQGAENMIQTYSN

SEQ ID NO: 21841 - protein, 22 aa, Artificial
  helical interface sequence
GAAGRRALETLRRVGDGVQRNH

SEQ ID NO: 21842 - protein, 25 aa, Artificial
  helical interface sequence
SDRMAACLRDMEIILRYVTYAVFAG

SEQ ID NO: 21843 - protein, 10 aa, Artificial
  helical interface sequence
TGPMDEYLIA

SEQ ID NO: 21844 - protein, 25 aa, Artificial
  helical interface sequence
SDRMAACLRDMEIILRYVTYAVFAG

SEQ ID NO: 21845 - protein, 25 aa, Artificial
  helical interface sequence
QRGKDKCARDIGYYLRMVTYCLIAG

SEQ ID NO: 21846 - protein, 25 aa, Artificial
  helical interface sequence
SDRMAACLRDMEIILRYVTYAVFAG

SEQ ID NO: 21847 - protein, 10 aa, Artificial
  helical interface sequence
FLSLYYGLVM

SEQ ID NO: 21848 - protein, 6 aa, Artificial
  helical interface sequence
SEQLTS

SEQ ID NO: 21849 - protein, 6 aa, Artificial
  helical interface sequence
GGFTNA

SEQ ID NO: 21850 - protein, 10 aa, Artificial
  helical interface sequence
VTPIANAWLD

SEQ ID NO: 21851 - protein, 14 aa, Artificial
  helical interface sequence
IPRLVMQAIRAALS

SEQ ID NO: 21852 - protein, 7 aa, Artificial
  helical interface sequence
QEDVEAV

SEQ ID NO: 21853 - protein, 11 aa, Artificial
  helical interface sequence
QQLLQVLQQTL

SEQ ID NO: 21854 - protein, 11 aa, Artificial
  helical interface sequence
QQLLQVLQQTL

SEQ ID NO: 21855 - protein, 7 aa, Artificial
  helical interface sequence
FSERVTK

SEQ ID NO: 21856 - protein, 10 aa, Artificial
  helical interface sequence
SVLAEAISDY

SEQ ID NO: 21857 - protein, 6 aa, Artificial
  helical interface sequence
IPLAVA

SEQ ID NO: 21858 - protein, 8 aa, Artificial
  helical interface sequence
LGETMKRL

SEQ ID NO: 21859 - protein, 9 aa, Artificial
  helical interface sequence
QAVLSLYAS

SEQ ID NO: 21860 - protein, 6 aa, Artificial
  helical interface sequence
ITCLTI

SEQ ID NO: 21861 - protein, 5 aa, Artificial
  helical interface sequence
RAIAE

SEQ ID NO: 21862 - protein, 14 aa, Artificial
  helical interface sequence
QQLLSRGVRLTELL

SEQ ID NO: 21863 - protein, 75 aa, Artificial; identical to SEQ ID NO: 2772
  helical interface sequence

SEQ ID NO: 21864 - protein, 30 aa, Artificial; identical to SEQ ID NO: 280
  helical interface sequence

SEQ ID NO: 21865 - protein, 19 aa, Artificial
  helical interface sequence
EHFEKLHEIFRGLLEDLQG

SEQ ID NO: 21866 - protein, 21 aa, Artificial
  helical interface sequence
FAEVSKLVTDLTKVHTECCHG

SEQ ID NO: 21867 - protein, 5 aa, Artificial
  helical interface sequence
QDSIS

SEQ ID NO: 21868 - protein, 17 aa, Artificial
  helical interface sequence
PLGILSNYVKTLLISMY

SEQ ID NO: 21869 - protein, 26 aa, Artificial
  helical interface sequence
QIARLEQERSTANKANAERLKRLQKS

SEQ ID NO: 21870 - protein, 10 aa, Artificial
  helical interface sequence
EFSHEAVKTH

SEQ ID NO: 21871 - protein, 6 aa, Artificial
  helical interface sequence
LASVYH

SEQ ID NO: 21872 - protein, 13 aa, Artificial
  helical interface sequence
EHQLRREIEIQSH

SEQ ID NO: 21873 - protein, 6 aa, Artificial
  helical interface sequence
SEELET

SEQ ID NO: 21874 - protein, 9 aa, Artificial
  helical interface sequence
GPLDDYIVA

SEQ ID NO: 21875 - protein, 21 aa, Artificial
  helical interface sequence
QACRVLQRVAFSVQKEVEKNL

SEQ ID NO: 21876 - protein, 6 aa, Artificial
  helical interface sequence
PKDVLT

SEQ ID NO: 21877 - protein, 17 aa, Artificial
  helical interface sequence
AVITTCLALGTRRMAKK

SEQ ID NO: 21878 - protein, 20 aa, Artificial
  helical interface sequence
VQLLWVNLVTDGLPATALGF

SEQ ID NO: 21879 - protein, 6 aa, Artificial
  helical interface sequence
DTCMAD

SEQ ID NO: 21880 - protein, 10 aa, Artificial
  helical interface sequence
ETAYGLLTAE

SEQ ID NO: 21881 - protein, 5 aa, Artificial
  helical interface sequence
SMEAK

SEQ ID NO: 21882 - protein, 5 aa, Artificial
  helical interface sequence
RNEMR

SEQ ID NO: 21883 - protein, 15 aa, Artificial
  helical interface sequence
FDAISSEILAIANIS

SEQ ID NO: 21884 - protein, 9 aa, Artificial
  helical interface sequence
RATCRAQYG

SEQ ID NO: 21885 - protein, 16 aa, Artificial
  helical interface sequence
MEEYAREVFPIEEEAN

SEQ ID NO: 21886 - protein, 16 aa, Artificial
  helical interface sequence
MEEYAREVFPIEEEAN

SEQ ID NO: 21887 - protein, 6 aa, Artificial
  helical interface sequence
SEELQA

SEQ ID NO: 21888 - protein, 16 aa, Artificial
  helical interface sequence
NETGYSNKVLDLIAHI

SEQ ID NO: 21889 - protein, 13 aa, Artificial
  helical interface sequence
RIGRLVLRVCMEK

SEQ ID NO: 21890 - protein, 15 aa, Artificial
  helical interface sequence
VKEVMHYLGQYIMVK

SEQ ID NO: 21891 - protein, 21 aa, Artificial
  helical interface sequence
LDALISGWARVEQIKAAKAST

SEQ ID NO: 21892 - protein, 11 aa, Artificial
  helical interface sequence
AAELRHVMTNL

SEQ ID NO: 21893 - protein, 7 aa, Artificial
  helical interface sequence
ENMRRPY

SEQ ID NO: 21894 - protein, 15 aa, Artificial
  helical interface sequence
PEELLQMELLLVNKL

SEQ ID NO: 21895 - protein, 5 aa, Artificial
  helical interface sequence
LEDVS

SEQ ID NO: 21896 - protein, 11 aa, Artificial
  helical interface sequence
KEEAQQILGVA

SEQ ID NO: 21897 - protein, 14 aa, Artificial
  helical interface sequence
LEFVNAIRRAAMLY

SEQ ID NO: 21898 - protein, 18 aa, Artificial
  helical interface sequence
IEAAREIIIREISKVLAE

SEQ ID NO: 21899 - protein, 10 aa, Artificial
  helical interface sequence
HFNEVFISLW

SEQ ID NO: 21900 - protein, 5 aa, Artificial
  helical interface sequence
FEARD

SEQ ID NO: 21901 - protein, 17 aa, Artificial
  helical interface sequence
RYEIARVISARALQLAM

SEQ ID NO: 21902 - protein, 11 aa, Artificial
  helical interface sequence
DEILAHRLALI

SEQ ID NO: 21903 - protein, 7 aa, Artificial
  helical interface sequence
PMEARLR

SEQ ID NO: 21904 - protein, 6 aa, Artificial
  helical interface sequence
AMLLKD

SEQ ID NO: 21905 - protein, 9 aa, Artificial
  helical interface sequence
QLQNEILKY

SEQ ID NO: 21906 - protein, 9 aa, Artificial
  helical interface sequence
VKHVYEFLK

SEQ ID NO: 21907 - protein, 13 aa, Artificial
  helical interface sequence
DLKNLISNKEVLV

SEQ ID NO: 21908 - protein, 8 aa, Artificial
  helical interface sequence
VVENIIIG

SEQ ID NO: 21909 - protein, 15 aa, Artificial
  helical interface sequence
AWARLDHKFDLMYAK

SEQ ID NO: 21910 - protein, 7 aa, Artificial
  helical interface sequence
VYDIVRT

SEQ ID NO: 21911 - protein, 15 aa, Artificial
  helical interface sequence
ALDACCMVHDHCVDT

SEQ ID NO: 21912 - protein, 11 aa, Artificial
  helical interface sequence
QSKIWDVVEKA

SEQ ID NO: 21913 - protein, 11 aa, Artificial
  helical interface sequence
QSKIWDVVEKA

SEQ ID NO: 21914 - protein, 17 aa, Artificial
  helical interface sequence
FPHMESVLGYIESGKAQ

SEQ ID NO: 21915 - protein, 13 aa, Artificial
  helical interface sequence
QENARLGRAIARL

SEQ ID NO: 21916 - protein, 20 aa, Artificial
  helical interface sequence
KVTAMKCFLLELQVISLESG

SEQ ID NO: 21917 - protein, 8 aa, Artificial
  helical interface sequence
LDEMRHFY

SEQ ID NO: 21918 - protein, 23 aa, Artificial
  helical interface sequence
AADTEAVTQLIGSNIELHSLYTS

SEQ ID NO: 21919 - protein, 12 aa, Artificial
  helical interface sequence
SDQLFGMCESLY

SEQ ID NO: 21920 - protein, 18 aa, Artificial
  helical interface sequence
PEDLFETISQALLNAADR

SEQ ID NO: 21921 - protein, 14 aa, Artificial
  helical interface sequence
FGAHMANPLLRKVV

SEQ ID NO: 21922 - protein, 22 aa, Artificial
  helical interface sequence
TADAEILINTARIHAQNYLKTY

SEQ ID NO: 21923 - protein, 22 aa, Artificial
  helical interface sequence
TADARSMIEHARTAAVTHNLYY

SEQ ID NO: 21924 - protein, 15 aa, Artificial
  helical interface sequence
VVSALQMLKQHLFKY

SEQ ID NO: 21925 - protein, 19 aa, Artificial
  helical interface sequence
VEEVIKLVRDSFTSATERH

SEQ ID NO: 21926 - protein, 14 aa, Artificial
  helical interface sequence
RSLANIFDEYTADL

SEQ ID NO: 21927 - protein, 9 aa, Artificial
  helical interface sequence
PEEVEEVIG

SEQ ID NO: 21928 - protein, 10 aa, Artificial
  helical interface sequence
MDDLCGSIID

SEQ ID NO: 21929 - protein, 22 aa, Artificial
  helical interface sequence
PELRQRVLFTLLVLAAYRLGAF

SEQ ID NO: 21930 - protein, 9 aa, Artificial
  helical interface sequence
VKAFWSALQ

SEQ ID NO: 21931 - protein, 5 aa, Artificial
  helical interface sequence
EHALR

SEQ ID NO: 21932 - protein, 13 aa, Artificial
  helical interface sequence
DETIRFKSYLLSM

SEQ ID NO: 21933 - protein, 22 aa, Artificial
  helical interface sequence
FDDFIQGCIVLQRLTDIFRRYD

SEQ ID NO: 21934 - protein, 14 aa, Artificial
  helical interface sequence
SVDLHTHCSYQLML

SEQ ID NO: 21935 - protein, 5 aa, Artificial
  helical interface sequence
VQAWI

SEQ ID NO: 21936 - protein, 9 aa, Artificial
  helical interface sequence
PTLRAKLAK

SEQ ID NO: 21937 - protein, 31 aa, Artificial; identical to SEQ ID NO: 4387
  helical interface sequence

SEQ ID NO: 21938 - protein, 28 aa, Artificial
  helical interface sequence
PLLSGIVLGLIVVTLAGLFYAAYKQYKR

SEQ ID NO: 21939 - protein, 9 aa, Artificial
  helical interface sequence
VNHLVKEID

SEQ ID NO: 21940 - protein, 20 aa, Artificial
  helical interface sequence
TDVEKSFDKLLKDLPELALD

SEQ ID NO: 21941 - protein, 13 aa, Artificial
  helical interface sequence
RELAQQIQKVVMA

SEQ ID NO: 21942 - protein, 9 aa, Artificial
  helical interface sequence
VNHLVKEID

SEQ ID NO: 21943 - protein, 35 aa, Artificial; identical to SEQ ID NO: 20388
  helical interface sequence

SEQ ID NO: 21944 - protein, 24 aa, Artificial
  helical interface sequence
IALHGAFGLIGFMLRQFEIARLVG

SEQ ID NO: 21945 - protein, 12 aa, Artificial
  helical interface sequence
FYTKNLLLNEGI

SEQ ID NO: 21946 - protein, 18 aa, Artificial
  helical interface sequence
EKDLVAIAGHILVEPKIL

SEQ ID NO: 21947 - protein, 5 aa, Artificial
  helical interface sequence
HIWHG

SEQ ID NO: 21948 - protein, 10 aa, Artificial
  helical interface sequence
CIIALFFFAI

SEQ ID NO: 21949 - protein, 9 aa, Artificial
  helical interface sequence
CIIALFFFA

SEQ ID NO: 21950 - protein, 20 aa, Artificial
  helical interface sequence
FPFFVVGVVHLISSAVLGFG

SEQ ID NO: 21951 - protein, 7 aa, Artificial
  helical interface sequence
FTRWCQL

SEQ ID NO: 21952 - protein, 9 aa, Artificial
  helical interface sequence
ISQEIRAAE

SEQ ID NO: 21953 - protein, 10 aa, Artificial
  helical interface sequence
WSGILLFPCA

SEQ ID NO: 21954 - protein, 10 aa, Artificial
  helical interface sequence
WSGILLFPCA

SEQ ID NO: 21955 - protein, 17 aa, Artificial
  helical interface sequence
TLAVPTIFFLGAIAAMQ

SEQ ID NO: 21956 - protein, 18 aa, Artificial
  helical interface sequence
VFMGLFLVFLLIILEIYN

SEQ ID NO: 21957 - protein, 9 aa, Artificial
  helical interface sequence
IIFLLAVRR

SEQ ID NO: 21958 - protein, 9 aa, Artificial
  helical interface sequence
IIFLLAVRR

SEQ ID NO: 21959 - protein, 10 aa, Artificial
  helical interface sequence
SRTREILTKT

SEQ ID NO: 21960 - protein, 6 aa, Artificial
  helical interface sequence
PVAFRG

SEQ ID NO: 21961 - protein, 7 aa, Artificial
  helical interface sequence
DEQLKSG

SEQ ID NO: 21962 - protein, 6 aa, Artificial
  helical interface sequence
PVAFRG

SEQ ID NO: 21963 - protein, 6 aa, Artificial
  helical interface sequence
PVAFRG

SEQ ID NO: 21964 - protein, 60 aa, Artificial; identical to SEQ ID NO: 711
  helical interface sequence

SEQ ID NO: 21965 - protein, 61 aa, Artificial; identical to SEQ ID NO: 337
  helical interface sequence

SEQ ID NO: 21966 - protein, 7 aa, Artificial
  helical interface sequence
DEAQSKR

SEQ ID NO: 21967 - protein, 14 aa, Artificial
  helical interface sequence
GRDLTDYLMKILTE

SEQ ID NO: 21968 - protein, 8 aa, Artificial
  helical interface sequence
VEEIEDAF

SEQ ID NO: 21969 - protein, 5 aa, Artificial
  helical interface sequence
CITLG

SEQ ID NO: 21970 - protein, 9 aa, Artificial
  helical interface sequence
DQQLKNMSG

SEQ ID NO: 21971 - protein, 8 aa, Artificial
  helical interface sequence
DQQLKNMS

SEQ ID NO: 21972 - protein, 15 aa, Artificial
  helical interface sequence
PANFKILSHNLLVVL

SEQ ID NO: 21973 - protein, 17 aa, Artificial
  helical interface sequence
MENLSRRLKVTGDLFDI

SEQ ID NO: 21974 - protein, 17 aa, Artificial
  helical interface sequence
MENLSRRLKVTGDLFDI

SEQ ID NO: 21975 - protein, 5 aa, Artificial
  helical interface sequence
YGPAL

SEQ ID NO: 21976 - protein, 11 aa, Artificial
  helical interface sequence
VDNASMQAVAK

SEQ ID NO: 21977 - protein, 15 aa, Artificial
  helical interface sequence
SMYGTILGNIGAALI

SEQ ID NO: 21978 - protein, 11 aa, Artificial
  helical interface sequence
VDNASMQAVAK

SEQ ID NO: 21979 - protein, 5 aa, Artificial
  helical interface sequence
DEQLK

SEQ ID NO: 21980 - protein, 21 aa, Artificial
  helical interface sequence
ELVAEAHNLCTLLENAIQDTV

SEQ ID NO: 21981 - protein, 5 aa, Artificial
  helical interface sequence
REQGN

SEQ ID NO: 21982 - protein, 60 aa, Artificial; identical to SEQ ID NO: 2060
  helical interface sequence

SEQ ID NO: 21983 - protein, 5 aa, Artificial
  helical interface sequence
SEQLT

SEQ ID NO: 21984 - protein, 6 aa, Artificial
  helical interface sequence
GLALKY

SEQ ID NO: 21985 - protein, 16 aa, Artificial
  helical interface sequence
PLESAINVLEMIKTEF

SEQ ID NO: 21986 - protein, 8 aa, Artificial
  helical interface sequence
QHIQLLQK

SEQ ID NO: 21987 - protein, 10 aa, Artificial
  helical interface sequence
WDEAEKFCRA

SEQ ID NO: 21988 - protein, 7 aa, Artificial
  helical interface sequence
LIYPLGQ

SEQ ID NO: 21989 - protein, 24 aa, Artificial
  helical interface sequence
RTSLYLGLLLILVLALLFSSYFFN

SEQ ID NO: 21990 - protein, 26 aa, Artificial
  helical interface sequence
FPFFVVGVVHLISSAVLGFGGVYHAI

SEQ ID NO: 21991 - protein, 24 aa, Artificial
  helical interface sequence
WSGILLFPCAYLALGGWLTGTTFV

SEQ ID NO: 21992 - protein, 7 aa, Artificial
  helical interface sequence
SEQLTSG

SEQ ID NO: 21993 - protein, 10 aa, Artificial
  helical interface sequence
VGRVHRLLRK

SEQ ID NO: 21994 - protein, 19 aa, Artificial
  helical interface sequence
YAIREAATSNLKKLVEKFG

SEQ ID NO: 21995 - protein, 21 aa, Artificial
  helical interface sequence
PEILERTRAELDTVCRHNYEG

SEQ ID NO: 21996 - protein, 21 aa, Artificial
  helical interface sequence
PEILERTRAELDTVCRHNYEG

SEQ ID NO: 21997 - protein, 6 aa, Artificial
  helical interface sequence
AKLLDS

SEQ ID NO: 21998 - protein, 23 aa, Artificial
  helical interface sequence
KPVVYSNTIQSLAAIVRAMDTLG

SEQ ID NO: 21999 - protein, 23 aa, Artificial
  helical interface sequence
VADARVLVDFARISAQQEKVTYG

SEQ ID NO: 22000 - protein, 22 aa, Artificial
  helical interface sequence
VGDAQVLVRYMKAELELYRLQR

SEQ ID NO: 22001 - protein, 23 aa, Artificial
  helical interface sequence
VADARVLVDFARISAQQEKVTYG

SEQ ID NO: 22002 - protein, 22 aa, Artificial
  helical interface sequence
VGDAQVLVRYMKAELELYRLQR

SEQ ID NO: 22003 - protein, 47 aa, Artificial
  helical interface sequence
ADLRIRKTQHSTLSRKFVEVMSEYNATQSDYRERCKGRIQRQLEITG

SEQ ID NO: 22004 - protein, 8 aa, Artificial
  helical interface sequence
NPIAAMAG

SEQ ID NO: 22005 - protein, 23 aa, Artificial
  helical interface sequence
ANLDLFLRRFNEIQFWVVTEVCL

SEQ ID NO: 22006 - protein, 6 aa, Artificial
  helical interface sequence
SEQLTS

SEQ ID NO: 22007 - protein, 7 aa, Artificial
  helical interface sequence
DEQLKSG

SEQ ID NO: 22008 - protein, 28 aa, Artificial
  helical interface sequence
SQEEQCLSNCVNRFLDTNIRIVNGLQNT

SEQ ID NO: 22009 - protein, 5 aa, Artificial
  helical interface sequence
VKFLF

SEQ ID NO: 22010 - protein, 9 aa, Artificial
  helical interface sequence
ASYLIRKAA

SEQ ID NO: 22011 - protein, 11 aa, Artificial
  helical interface sequence
YHQRLRLLKSG

SEQ ID NO: 22012 - protein, 23 aa, Artificial
  helical interface sequence
QNEEDAKLLYGMIFSLRSITQKL

SEQ ID NO: 22013 - protein, 9 aa, Artificial
  helical interface sequence
KSCLLLRFS

SEQ ID NO: 22014 - protein, 14 aa, Artificial
  helical interface sequence
MAALITKHKWEQAG

SEQ ID NO: 22015 - protein, 5 aa, Artificial
  helical interface sequence
FRKSN

SEQ ID NO: 22016 - protein, 22 aa, Artificial
  helical interface sequence
VLSKFFFFIFVFNFVLLGQIGA

SEQ ID NO: 22017 - protein, 12 aa, Artificial
  helical interface sequence
AFSSVEHIMRDV

SEQ ID NO: 22018 - protein, 9 aa, Artificial
  helical interface sequence
NEEVRNMAE

SEQ ID NO: 22019 - protein, 19 aa, Artificial
  helical interface sequence
HASIRRGYQVYREVCAACH

SEQ ID NO: 22020 - protein, 13 aa, Artificial
  helical interface sequence
LWKAFFFVTLPLS

SEQ ID NO: 22021 - protein, 15 aa, Artificial
  helical interface sequence
FEKRRSEGEKIRKKY

SEQ ID NO: 22022 - protein, 17 aa, Artificial
  helical interface sequence
QVEKAVLRIALYELSKR

SEQ ID NO: 22023 - protein, 6 aa, Artificial
  helical interface sequence
FITKAI

SEQ ID NO: 22024 - protein, 5 aa, Artificial
  helical interface sequence
VYDIV

SEQ ID NO: 22025 - protein, 5 aa, Artificial
  helical interface sequence
YLLPR

SEQ ID NO: 22026 - protein, 5 aa, Artificial
  helical interface sequence
KRHLN

SEQ ID NO: 22027 - protein, 8 aa, Artificial
  helical interface sequence
WDGFVEFF

SEQ ID NO: 22028 - protein, 12 aa, Artificial
  helical interface sequence
ISDLHQTLKKEL

SEQ ID NO: 22029 - protein, 15 aa, Artificial
  helical interface sequence
VKEVMHYLGQYIMVK

SEQ ID NO: 22030 - protein, 10 aa, Artificial
  helical interface sequence
IDIRKDLYAN

SEQ ID NO: 22031 - protein, 6 aa, Artificial
  helical interface sequence
LKEQKY

SEQ ID NO: 22032 - protein, 11 aa, Artificial
  helical interface sequence
LGCELLKNLAL

SEQ ID NO: 22033 - protein, 33 aa, Artificial
  helical interface sequence
SGKYIKLQNVYREKAKKDAAAVGNHVAKLLQSI

SEQ ID NO: 22034 - protein, 21 aa, Artificial
  helical interface sequence
ASTNAVIAAVCATEVFKIATS

SEQ ID NO: 22035 - protein, 6 aa, Artificial
  helical interface sequence
GEDAGN

SEQ ID NO: 22036 - protein, 16 aa, Artificial
  helical interface sequence
NKRTALNSALLFLRRN

SEQ ID NO: 22037 - protein, 9 aa, Artificial
  helical interface sequence
EFASLFDTL

SEQ ID NO: 22038 - protein, 5 aa, Artificial
  helical interface sequence
KSNFQ

SEQ ID NO: 22039 - protein, 9 aa, Artificial
  helical interface sequence
EDESLALSL

SEQ ID NO: 22040 - protein, 6 aa, Artificial
  helical interface sequence
ASRAMG

SEQ ID NO: 22041 - protein, 11 aa, Artificial
  helical interface sequence
GISILIFAGIV

SEQ ID NO: 22042 - protein, 16 aa, Artificial
  helical interface sequence
MLAGTMFLLWLGERIT

SEQ ID NO: 22043 - protein, 18 aa, Artificial
  helical interface sequence
STKLYVQANAFVRTLKAE

SEQ ID NO: 22044 - protein, 10 aa, Artificial
  helical interface sequence
AEYFAYQMRY

SEQ ID NO: 22045 - protein, 10 aa, Artificial
  helical interface sequence
AEYFAYQMRY

SEQ ID NO: 22046 - protein, 9 aa, Artificial
  helical interface sequence
MRDNWRSEL

SEQ ID NO: 22047 - protein, 10 aa, Artificial
  helical interface sequence
KEQIEWLIEH

SEQ ID NO: 22048 - protein, 15 aa, Artificial
  helical interface sequence
KLAIIYFCLHGLQLI

SEQ ID NO: 22049 - protein, 16 aa, Artificial
  helical interface sequence
NQELIYYRNFIINQFM

SEQ ID NO: 22050 - protein, 14 aa, Artificial
  helical interface sequence
FRDYVDRFAKTLRA

SEQ ID NO: 22051 - protein, 10 aa, Artificial
  helical interface sequence
YEELVRMVLS

SEQ ID NO: 22052 - protein, 8 aa, Artificial
  helical interface sequence
EEVEQLVA

SEQ ID NO: 22053 - protein, 7 aa, Artificial
  helical interface sequence
SPLEIAW

SEQ ID NO: 22054 - protein, 12 aa, Artificial
  helical interface sequence
MSTAVLNGLRAL

SEQ ID NO: 22055 - protein, 7 aa, Artificial
  helical interface sequence
VTDLISI

SEQ ID NO: 22056 - protein, 17 aa, Artificial
  helical interface sequence
SGRIVGFFDVGRYVCEE

SEQ ID NO: 22057 - protein, 12 aa, Artificial
  helical interface sequence
FHDLMELFRIGG

SEQ ID NO: 22058 - protein, 6 aa, Artificial
  helical interface sequence
KDNTIE

SEQ ID NO: 22059 - protein, 29 aa, Artificial
  helical interface sequence
PEYWDRETQISKTNTQTYRENLRTALRYY

SEQ ID NO: 22060 - protein, 7 aa, Artificial
  helical interface sequence
EAEISHT

SEQ ID NO: 22061 - protein, 8 aa, Artificial
  helical interface sequence
MDDVYNYI

SEQ ID NO: 22062 - protein, 16 aa, Artificial
  helical interface sequence
NVKFIQEKKLIGRYFD

SEQ ID NO: 22063 - protein, 16 aa, Artificial
  helical interface sequence
TPLQAALAEAFWIDIK

SEQ ID NO: 22064 - protein, 15 aa, Artificial
  helical interface sequence
FMHILTRVNRKVATE

SEQ ID NO: 22065 - protein, 25 aa, Artificial
  helical interface sequence
AAEEAYTRTTRALHERFDRLERMLD

SEQ ID NO: 22066 - protein, 12 aa, Artificial
  helical interface sequence
ISEAEHCLKELE

SEQ ID NO: 22067 - protein, 22 aa, Artificial
  helical interface sequence
SSALRGTVNSYLRWIKAAIDVI

SEQ ID NO: 22068 - protein, 5 aa, Artificial
  helical interface sequence
IESFF

SEQ ID NO: 22069 - protein, 11 aa, Artificial
  helical interface sequence
VEDLLSLRQVV

SEQ ID NO: 22070 - protein, 10 aa, Artificial
  helical interface sequence
PEHAERAAHV

SEQ ID NO: 22071 - protein, 7 aa, Artificial
  helical interface sequence
VEEIEDA

SEQ ID NO: 22072 - protein, 10 aa, Artificial
  helical interface sequence
PEHAERAAHV

SEQ ID NO: 22073 - protein, 7 aa, Artificial
  helical interface sequence
RPILQGF

SEQ ID NO: 22074 - protein, 8 aa, Artificial
  helical interface sequence
PEKIRNAC

SEQ ID NO: 22075 - protein, 12 aa, Artificial
  helical interface sequence
QQELYDELLTLA

SEQ ID NO: 22076 - protein, 13 aa, Artificial
  helical interface sequence
GQIFEAYNMAALW

SEQ ID NO: 22077 - protein, 20 aa, Artificial
  helical interface sequence
LKSTQAAIDQINGKLNRLIE

SEQ ID NO: 22078 - protein, 13 aa, Artificial
  helical interface sequence
EEDLCAAFNVICD

SEQ ID NO: 22079 - protein, 13 aa, Artificial
  helical interface sequence
EEDLCAAFNVICD

SEQ ID NO: 22080 - protein, 13 aa, Artificial
  helical interface sequence
EEDLCAAFNVICD

SEQ ID NO: 22081 - protein, 17 aa, Artificial
  helical interface sequence
AKEQRILAKTIKRARIL

SEQ ID NO: 22082 - protein, 5 aa, Artificial
  helical interface sequence
VALPR

SEQ ID NO: 22083 - protein, 10 aa, Artificial
  helical interface sequence
LEEARNILRY

SEQ ID NO: 22084 - protein, 20 aa, Artificial
  helical interface sequence
SSTFREWKNLVLKLSQAFGS

SEQ ID NO: 22085 - protein, 6 aa, Artificial
  helical interface sequence
SAEYLQ

SEQ ID NO: 22086 - protein, 9 aa, Artificial
  helical interface sequence
NSFAFELCS

SEQ ID NO: 22087 - protein, 11 aa, Artificial
  helical interface sequence
LLIEMLHAKRA

SEQ ID NO: 22088 - protein, 15 aa, Artificial
  helical interface sequence
MDSRLQRIHAEIKNS

SEQ ID NO: 22089 - protein, 21 aa, Artificial
  helical interface sequence
QVIMEKSTMLYNKFKNMFLVG

SEQ ID NO: 22090 - protein, 12 aa, Artificial
  helical interface sequence
IEPAQEEHEKYH

SEQ ID NO: 22091 - protein, 10 aa, Artificial
  helical interface sequence
NLVARQIVNS

SEQ ID NO: 22092 - protein, 10 aa, Artificial
  helical interface sequence
NLVARQIVNS

SEQ ID NO: 22093 - protein, 21 aa, Artificial
  helical interface sequence
QVIMEKSTMLYNKFKNMFLVG

SEQ ID NO: 22094 - protein, 7 aa, Artificial
  helical interface sequence
RFAKLLL

SEQ ID NO: 22095 - protein, 14 aa, Artificial
  helical interface sequence
PVTNICQAADKQLF

SEQ ID NO: 22096 - protein, 11 aa, Artificial
  helical interface sequence
VNLYQNYSELI

SEQ ID NO: 22097 - protein, 12 aa, Artificial
  helical interface sequence
FEQKMGELLSEN

SEQ ID NO: 22098 - protein, 8 aa, Artificial
  helical interface sequence
FVLIQLLT

SEQ ID NO: 22099 - protein, 8 aa, Artificial
  helical interface sequence
FVLIQLLT

SEQ ID NO: 22100 - protein, 27 aa, Artificial
  helical interface sequence
LWGDFAAAAVMSALPITIVFLLAQRWL

SEQ ID NO: 22101 - protein, 19 aa, Artificial
  helical interface sequence
PVNFKLLSHCLLVTLASHL

SEQ ID NO: 22102 - protein, 18 aa, Artificial
  helical interface sequence
GDLRREISMSIKRLMDLG

SEQ ID NO: 22103 - protein, 12 aa, Artificial
  helical interface sequence
YRVAFQAVIKAG

SEQ ID NO: 22104 - protein, 7 aa, Artificial
  helical interface sequence
VYDIVRT

SEQ ID NO: 22105 - protein, 7 aa, Artificial
  helical interface sequence
AELFYKG

SEQ ID NO: 22106 - protein, 27 aa, Artificial
  helical interface sequence
MINRYSILYNRTRQAVITNELVDIITG

SEQ ID NO: 22107 - protein, 5 aa, Artificial
  helical interface sequence
EVFTG

SEQ ID NO: 22108 - protein, 5 aa, Artificial
  helical interface sequence
KIVAS

SEQ ID NO: 22109 - protein, 29 aa, Artificial
  helical interface sequence
MINRYSILYNRTRQAVITNELVDIITGAS

SEQ ID NO: 22110 - protein, 14 aa, Artificial
  helical interface sequence
LSKQAVAYRQLSLL

SEQ ID NO: 22111 - protein, 15 aa, Artificial
  helical interface sequence
IFRFTQAGSEVSALL

SEQ ID NO: 22112 - protein, 22 aa, Artificial
  helical interface sequence
KESTQKAIDGVTNKVNSIIDKM

SEQ ID NO: 22113 - protein, 50 aa, Artificial; identical to SEQ ID NO: 2008
  helical interface sequence

SEQ ID NO: 22114 - protein, 22 aa, Artificial
  helical interface sequence
KESTQKAIDGVTNKVNSIIDKM

SEQ ID NO: 22115 - protein, 12 aa, Artificial
  helical interface sequence
RRIENLNKKMED

SEQ ID NO: 22116 - protein, 10 aa, Artificial
  helical interface sequence
YEELKHLLSR

SEQ ID NO: 22117 - protein, 17 aa, Artificial
  helical interface sequence
RELMETGRSVVQKYLND

SEQ ID NO: 22118 - protein, 19 aa, Artificial
  helical interface sequence
PVNFKLLGQCFLVVVAIHH

SEQ ID NO: 22119 - protein, 20 aa, Artificial
  helical interface sequence
PENFRLLGDILIIVLAAHFT

SEQ ID NO: 22120 - protein, 10 aa, Artificial
  helical interface sequence
YQEQLKLINH

SEQ ID NO: 22121 - protein, 11 aa, Artificial
  helical interface sequence
LKSQIQQYLVE

SEQ ID NO: 22122 - protein, 11 aa, Artificial
  helical interface sequence
IKNLRRVAKEL

SEQ ID NO: 22123 - protein, 13 aa, Artificial
  helical interface sequence
WVDKVKDLTKSEM

SEQ ID NO: 22124 - protein, 14 aa, Artificial
  helical interface sequence
WVDKVKDLTKSEMN

SEQ ID NO: 22125 - protein, 11 aa, Artificial
  helical interface sequence
HRKIYTMIYRN

SEQ ID NO: 22126 - protein, 16 aa, Artificial
  helical interface sequence
LQLLGAVCMLLASKLR

SEQ ID NO: 22127 - protein, 8 aa, Artificial
  helical interface sequence
VAWRNRCK

SEQ ID NO: 22128 - protein, 12 aa, Artificial
  helical interface sequence
DEEVDEMIREAD

SEQ ID NO: 22129 - protein, 9 aa, Artificial
  helical interface sequence
YEEFVQMMT

SEQ ID NO: 22130 - protein, 5 aa, Artificial
  helical interface sequence
TVRRS

SEQ ID NO: 22131 - protein, 7 aa, Artificial
  helical interface sequence
KGVFVLN

SEQ ID NO: 22132 - protein, 11 aa, Artificial
  helical interface sequence
QSKIWDVVEKA

SEQ ID NO: 22133 - protein, 21 aa, Artificial
  helical interface sequence
LEKRQGALELIKKGYTQQLAF

SEQ ID NO: 22134 - protein, 14 aa, Artificial
  helical interface sequence
TDLARTLKKIQKEG

SEQ ID NO: 22135 - protein, 16 aa, Artificial
  helical interface sequence
AVDAAIVVSYVLGVVE

SEQ ID NO: 22136 - protein, 5 aa, Artificial
  helical interface sequence
AKGFY

SEQ ID NO: 22137 - protein, 16 aa, Artificial
  helical interface sequence
AVDAAIVVSYVLGVVE

SEQ ID NO: 22138 - protein, 16 aa, Artificial
  helical interface sequence
HGKLTNQLLQAVAKQT

SEQ ID NO: 22139 - protein, 5 aa, Artificial
  helical interface sequence
EEQLF

SEQ ID NO: 22140 - protein, 7 aa, Artificial
  helical interface sequence
LFFPHEY

SEQ ID NO: 22141 - protein, 14 aa, Artificial
  helical interface sequence
WGRCWDVITENVLN

SEQ ID NO: 22142 - protein, 8 aa, Artificial
  helical interface sequence
LTVLLDCL

SEQ ID NO: 22143 - protein, 19 aa, Artificial
  helical interface sequence
IDAATLKSRKMLEEIMKYE

SEQ ID NO: 22144 - protein, 16 aa, Artificial
  helical interface sequence
QQERPIRNSVDELNNN

SEQ ID NO: 22145 - protein, 9 aa, Artificial
  helical interface sequence
GCQLQEALL

SEQ ID NO: 22146 - protein, 5 aa, Artificial
  helical interface sequence
LSTYQ

SEQ ID NO: 22147 - protein, 9 aa, Artificial
  helical interface sequence
EYSSELEKH

SEQ ID NO: 22148 - protein, 29 aa, Artificial
  helical interface sequence
PEYWDGETRKVKAHSQTHRVDLGTLRGYY

SEQ ID NO: 22149 - protein, 6 aa, Artificial
  helical interface sequence
VTILSR

SEQ ID NO: 22150 - protein, 8 aa, Artificial
  helical interface sequence
LRALFDKH

SEQ ID NO: 22151 - protein, 13 aa, Artificial
  helical interface sequence
EHVLTALANGLSL

SEQ ID NO: 22152 - protein, 20 aa, Artificial
  helical interface sequence
APARLHWLATLLMDALKRHH

SEQ ID NO: 22153 - protein, 13 aa, Artificial
  helical interface sequence
VDAVREVTEKLNE

SEQ ID NO: 22154 - protein, 6 aa, Artificial
  helical interface sequence
LKTLEE

SEQ ID NO: 22155 - protein, 31 aa, Artificial; identical to SEQ ID NO: 10296
  helical interface sequence

SEQ ID NO: 22156 - protein, 17 aa, Artificial
  helical interface sequence
NEMVTFLQGELHVSKLF

SEQ ID NO: 22157 - protein, 6 aa, Artificial
  helical interface sequence
DEQLKS

SEQ ID NO: 22158 - protein, 7 aa, Artificial
  helical interface sequence
VSENVIL

SEQ ID NO: 22159 - protein, 6 aa, Artificial
  helical interface sequence
IRARLK

SEQ ID NO: 22160 - protein, 7 aa, Artificial
  helical interface sequence
PVALYLG

SEQ ID NO: 22161 - protein, 7 aa, Artificial
  helical interface sequence
FEDNVVR

SEQ ID NO: 22162 - protein, 9 aa, Artificial
  helical interface sequence
AGRLAEVNL

SEQ ID NO: 22163 - protein, 17 aa, Artificial
  helical interface sequence
LKQKIEEIAKQNLYNAQ

SEQ ID NO: 22164 - protein, 12 aa, Artificial
  helical interface sequence
SNAILRYIARKH

SEQ ID NO: 22165 - protein, 15 aa, Artificial
  helical interface sequence
SDLIQQFNQMIITMN

SEQ ID NO: 22166 - protein, 13 aa, Artificial
  helical interface sequence
IFEMYARTRDEGF

SEQ ID NO: 22167 - protein, 10 aa, Artificial
  helical interface sequence
KEWIEEIKKN

SEQ ID NO: 22168 - protein, 20 aa, Artificial
  helical interface sequence
PKEVVESFYDRYNQTEEKVK

SEQ ID NO: 22169 - protein, 11 aa, Artificial
  helical interface sequence
IIAPSEASSNL

SEQ ID NO: 22170 - protein, 24 aa, Artificial
  helical interface sequence
YYDAYYLKAQKVRRLITNDFLKAF

SEQ ID NO: 22171 - protein, 26 aa, Artificial
  helical interface sequence
KEIMQVALNQAKGARLHILGVMEQAI

SEQ ID NO: 22172 - protein, 29 aa, Artificial
  helical interface sequence
TKRALIQCAKDIAKASDEVTRLAKEVAKQ

SEQ ID NO: 22173 - protein, 6 aa, Artificial
  helical interface sequence
LIAEAK

SEQ ID NO: 22174 - protein, 6 aa, Artificial
  helical interface sequence
LYKMRT

SEQ ID NO: 22175 - protein, 6 aa, Artificial
  helical interface sequence
LYKMRT

SEQ ID NO: 22176 - protein, 6 aa, Artificial
  helical interface sequence
LIAEAK

SEQ ID NO: 22177 - protein, 6 aa, Artificial
  helical interface sequence
SEELQA

SEQ ID NO: 22178 - protein, 6 aa, Artificial
  helical interface sequence
DEQLKS

SEQ ID NO: 22179 - protein, 6 aa, Artificial
  helical interface sequence
SSDFEA

SEQ ID NO: 22180 - protein, 11 aa, Artificial
  helical interface sequence
EEAIAEAKEIM

SEQ ID NO: 22181 - protein, 8 aa, Artificial
  helical interface sequence
LNEIALNE

SEQ ID NO: 22182 - protein, 8 aa, Artificial
  helical interface sequence
ILHWLIKE

SEQ ID NO: 22183 - protein, 6 aa, Artificial
  helical interface sequence
ECLRYC

SEQ ID NO: 22184 - protein, 11 aa, Artificial
  helical interface sequence
IEAAREIIIRE

SEQ ID NO: 22185 - protein, 16 aa, Artificial
  helical interface sequence
RYEIARVISARALQLA

SEQ ID NO: 22186 - protein, 15 aa, Artificial
  helical interface sequence
VGVLAAQSIGEPATQ

SEQ ID NO: 22187 - protein, 6 aa, Artificial
  helical interface sequence
IRARLK

SEQ ID NO: 22188 - protein, 17 aa, Artificial
  helical interface sequence
VAHLIECLLSKVAALSG

SEQ ID NO: 22189 - protein, 22 aa, Artificial
  helical interface sequence
LKLQVLLDEEYKQLVKDRKFLR

SEQ ID NO: 22190 - protein, 17 aa, Artificial
  helical interface sequence
EARLVIKEALVERRRAF

SEQ ID NO: 22191 - protein, 17 aa, Artificial
  helical interface sequence
KYERARILGTRALQISM

SEQ ID NO: 22192 - protein, 12 aa, Artificial
  helical interface sequence
VGVLAAQSIGEP

SEQ ID NO: 22193 - protein, 5 aa, Artificial
  helical interface sequence
KSIAK

SEQ ID NO: 22194 - protein, 14 aa, Artificial
  helical interface sequence
MKQYLKTKLLEEVE

SEQ ID NO: 22195 - protein, 6 aa, Artificial
  helical interface sequence
TQMDQD

SEQ ID NO: 22196 - protein, 5 aa, Artificial
  helical interface sequence
SKDIR

SEQ ID NO: 22197 - protein, 9 aa, Artificial
  helical interface sequence
TDLVIEIND

SEQ ID NO: 22198 - protein, 8 aa, Artificial
  helical interface sequence
DLVIEIND

SEQ ID NO: 22199 - protein, 17 aa, Artificial
  helical interface sequence
PAAQAAFQKVVAGVATA

SEQ ID NO: 22200 - protein, 8 aa, Artificial
  helical interface sequence
KQIVKDVL

SEQ ID NO: 22201 - protein, 16 aa, Artificial
  helical interface sequence
KSLSALGNVISALAEG

SEQ ID NO: 22202 - protein, 17 aa, Artificial
  helical interface sequence
PTQLPQYLQTEKLARTQ

SEQ ID NO: 22203 - protein, 20 aa, Artificial
  helical interface sequence
WRDRFLFCAEALYKAQAETG

SEQ ID NO: 22204 - protein, 15 aa, Artificial
  helical interface sequence
QEQLLSEVEYLLKNG

SEQ ID NO: 22205 - protein, 5 aa, Artificial
  helical interface sequence
VDMSY

SEQ ID NO: 22206 - protein, 9 aa, Artificial
  helical interface sequence
DLTTYLDKV

SEQ ID NO: 22207 - protein, 11 aa, Artificial
  helical interface sequence
VCVGDRLSGAR

SEQ ID NO: 22208 - protein, 5 aa, Artificial
  helical interface sequence
TALNV

SEQ ID NO: 22209 - protein, 9 aa, Artificial
  helical interface sequence
SPVHDAART

SEQ ID NO: 22210 - protein, 15 aa, Artificial
  helical interface sequence
QDLRSHLVHKLVQAI

SEQ ID NO: 22211 - protein, 19 aa, Artificial
  helical interface sequence
RDEYYHLLAEKIYKIQKEL

SEQ ID NO: 22212 - protein, 13 aa, Artificial
  helical interface sequence
TDSQKRREILSRR

SEQ ID NO: 22213 - protein, 12 aa, Artificial
  helical interface sequence
YRKILNDLSSDA

SEQ ID NO: 22214 - protein, 34 aa, Artificial
  helical interface sequence
VIDSLQQEYKKQMLTAHALAVDAKNLLDQARLKM

SEQ ID NO: 22215 - protein, 12 aa, Artificial
  helical interface sequence
TRELDELMASLS

SEQ ID NO: 22216 - protein, 26 aa, Artificial
  helical interface sequence
EYVPMVKEVGLALRTLATVDETIPLP

SEQ ID NO: 22217 - protein, 27 aa, Artificial
  helical interface sequence
REIEMAQKLLNSDLGELINKMKLAQQY

SEQ ID NO: 22218 - protein, 11 aa, Artificial
  helical interface sequence
TRELDELMASL

SEQ ID NO: 22219 - protein, 13 aa, Artificial
  helical interface sequence
SQLELEEAFRLYE

SEQ ID NO: 22220 - protein, 17 aa, Artificial
  helical interface sequence
GFQEFSRLLRAVHQIPG

SEQ ID NO: 22221 - protein, 16 aa, Artificial
  helical interface sequence
PAEVFKGKVEAVLEKL

SEQ ID NO: 22222 - protein, 12 aa, Artificial
  helical interface sequence
FETSKFFTDLRD

SEQ ID NO: 22223 - protein, 5 aa, Artificial
  helical interface sequence
VSEVS

SEQ ID NO: 22224 - protein, 11 aa, Artificial
  helical interface sequence
MDVVKNVVESL

SEQ ID NO: 22225 - protein, 6 aa, Artificial
  helical interface sequence
KIIEEI

SEQ ID NO: 22226 - protein, 13 aa, Artificial
  helical interface sequence
EEVEALYELFKLS

SEQ ID NO: 22227 - protein, 8 aa, Artificial
  helical interface sequence
EEFQLALF

SEQ ID NO: 22228 - protein, 10 aa, Artificial
  helical interface sequence
FADRIFDVFD

SEQ ID NO: 22229 - protein, 10 aa, Artificial
  helical interface sequence
GEFVRSLGVF

SEQ ID NO: 22230 - protein, 12 aa, Artificial
  helical interface sequence
HEKVKFAFKLYD

SEQ ID NO: 22231 - protein, 12 aa, Artificial
  helical interface sequence
EELKEMVALHES

SEQ ID NO: 22232 - protein, 15 aa, Artificial
  helical interface sequence
DMIEVMVDKAFVQAD

SEQ ID NO: 22233 - protein, 10 aa, Artificial
  helical interface sequence
DEWKDFVSLN

SEQ ID NO: 22234 - protein, 8 aa, Artificial
  helical interface sequence
NAFEMITL

SEQ ID NO: 22235 - protein, 29 aa, Artificial
  helical interface sequence
PEYWEGETRKVKAHSQTHARVDLGTLRGY

SEQ ID NO: 22236 - protein, 11 aa, Artificial
  helical interface sequence
MAQTTKHKWEA

SEQ ID NO: 22237 - protein, 9 aa, Artificial
  helical interface sequence
VAEQLRAYL

SEQ ID NO: 22238 - protein, 13 aa, Artificial
  helical interface sequence
GTCVEWLRRYLEN

SEQ ID NO: 22239 - protein, 21 aa, Artificial
  helical interface sequence
SDEEMKAMLSYYSTVMEQQVN

SEQ ID NO: 22240 - protein, 20 aa, Artificial
  helical interface sequence
DEEMKAMLSYYSTVMEQQVN
